(19) United States
(12) Patent Application Publication
(10) Pub. No.: US 2023/0383277 A1
(43) Pub. Date: Nov. 30, 2023

(54) COMPOSITIONS AND METHODS FOR TREATING GLYCOGEN STORAGE DISEASE TYPE 1A

(71) Applicant: Beam Therapeutics Inc., Cambridge, MA (US)

(72) Inventors: Brian CAFFERTY, Cambridge, MA (US); Tanggis BOHNUUD, Cambridge, MA (US); Lo-I CHENG, Cambridge, MA (US); Michael PACKER, Cambridge, MA (US); Yvonne ARATYN-SCHAUS, Cambridge, MA (US)

(73) Assignee: Beam Therapeutics Inc., Cambridge, MA (US)

(21) Appl. No.: 18/031,547

(22) PCT Filed: Oct. 14, 2021
(86) PCT No.: PCT/US2021/055057

§ 371 Date: Apr. 12, 2023

Related U.S. Application Data
(60) Provisional application No. 63/091,891, filed on Oct. 14, 2020.
(60) Provisional application No. 63/248,081, filed on Sep. 24, 2021.

(51) Int. Cl. C12N 9/78; A61K 48/00; C12N 9/22; C12N 15/11; C12N 15/113

(52) U.S. Cl. CPC C12N 9/78; A61K 48/0066; C12Y 305/04004; C12N 9/22; C12N 15/11; C12N 15/1137; C12Y 301/03009; C07K 2319/80; C12N 2310/20; C12N 2310/321; C12N 2310/315

(57) ABSTRACT

Described and provided are adenosine base editors and compositions comprising adenosine base editors that have increased efficiency. Also described and provided are methods of using base editors comprising adenosine deaminase variants for altering mutations associated with Glycogen Storage Disease Type 1a (GSD1a).

### CROSS REFERENCE TO RELATED APPLICATIONS

[0001] This application claims priority to and benefit of Provisional Patent Application Nos. 63/091,891, filed on Oct. 14, 2020 and 63/248,081, filed on Sep. 24, 2021, the contents of all of which are hereby incorporated by reference in their entireties.

### SEQUENCE LISTING

[0002] This application contains a Sequence Listing which has been submitted electronically in ASCII format and is hereby incorporated by reference in its entirety. The ASCII copy, created on Oct. 14, 2021, is named 180802-047002PCT_SL and is 2,088,767 bytes in size.

### BACKGROUND OF THE DISCLOSURE

[0003] For most known genetic diseases, correction of a point mutation in the target locus, rather than stochastic disruption of the gene, is needed to study or address the underlying cause of the disease. Current genome editing technologies utilizing the clustered regularly interspaced short palindromic repeat (CRISPR) system introduce double-stranded DNA breaks at a target locus as the first step to gene correction. In response to double-stranded DNA breaks, cellular DNA repair processes mostly result in random insertions or deletions (indels) at the site of DNA cleavage through non-homologous end joining. Although most genetic diseases arise from point mutations, current approaches to point mutation correction are inefficient and typically induce an abundance of random insertions and deletions (indels) at the target locus resulting from the cellular response to dsDNA breaks. Therefore, there is a need for an improved form of genome editing that is more efficient and with far fewer undesired products such as stochastic insertions or deletions (indels) or translocations.

[0004] Glycogen Storage Disease Type 1 (also known as GSD1 or Von Gierke Disease) is an inherited disorder that results in a deficiency in glycogenolysis and gluconeogenesis, with accumulation of glycogen and lipids in tissues, causing life-threatening hypoglycemia and lactic acidosis and leading to potential CNS damage and long-term liver and renal complications, such as steatosis, hepatic adenomas and hepatocellular carcinomas.

[0005] There are two types of GSD1, Type 1a (GSD1a or GSD-Ia) and Type 1b (GSD1b), which are caused by different genetic mutations. GSD1a is caused by a mutation in the glucose-6-phosphatase (G6PC) gene and affects about 80% of patients with GSD1. About one in 100,000 newborns in the US have GSD1a with about 22% of patients carrying the recessive mutation Q347* and 37% of patients carrying the recessive mutation R83C.

[0006] There are no drug therapies approved for GSD1a. Although liver transplants are curative, there are no approved therapies and the current treatment regimen involves nearly continuous cornstarch feeding. If chronically untreated, patients develop severe lactic acidosis, can progress to renal failure, and die in infancy or childhood. GSD1a is an area of significant unmet medical need. Therefore, there is a need for novel compositions and methods for treating patients with GSD1a.

### SUMMARY OF THE DISCLOSURE AND EMBODIMENTS

[0007] Featured, provided and described herein are compositions and methods for the precise correction of pathogenic amino acids using a programmable nucleobase editor. In particular, the compositions and methods disclosed and described herein are useful for the treatment of Glycogen Storage Disease Type 1a (GSD1a). Thus, compositions and methods are provided for treating GSD1a using an adenosine (A) base editor (ABE) to precisely correct a single nucleotide polymorphism in the endogenous G6PC gene to correct a deleterious mutation (e.g., Q347X, R83C).

[0008] In an aspect, an adenosine deaminase variant including a glycine (G) at amino acid position 82, a threonine (T) or an aspartic acid (D) at amino acid position 147, a serine (S) at amino acid position 154, and one or more of a histidine (H) at amino acid position 36, a tyrosine at amino acid position 76, a tyrosine at amino acid position 149, a lysine (K) at amino acid position 157, and an asparagine (N) at amino acid position 167 of the following amino acid sequence is provided, wherein the adenosine deaminase has at least about 85% identity to said amino acid sequence: MSEVEFSHEYWMRHALTLAKRARDEREVPVGAVLVLNNRVIGEGWNRAIGLHDPTAHAEIMA LRQGGLVMQNYRLIDATLYVTFEPCVMCAGAMIHSRIGRVVFGVRNAKTGAAGSLMDVLHYP GMNHRVEITEGILADECAALLCYFFRMPRQVFNAQKKAQSSTD (SEQ ID NO: 1), or corresponding alterations in another adenosine deaminase.

[0009] Another aspect provides an adenosine deaminase variant, including any of the following combinations of alterations: a) I76Y+V82G+Y147T+Q154S; b) L36H+V82G+Y147T+Q154S+N157K; c) V82G+Y147D+F149Y+Q154S+D167N; d) L36H+V82G+Y147D+F149Y+Q154S+N157K+D167N; e) L36H+I76Y+V82G+Y147T+Q154S+N157K; f) I76Y+V82G+Y147D+F149Y+Q154S+D167N; g) Y147D+F149Y+D167N; h) L36H; I76Y; V82G; Q154S; and N157K; i) I76Y; V82G; Q154S; or j) L36H+I76Y+V82G+Y147D+F149Y+Q154S+N157K+D167N with reference to SEQ ID NO: 1: MSEVEFSHEYWMRHALTLAKRARDEREVPVGAVLVLNNRVIGEGWNRAIGLHDPTAHAEIMA LRQGGLVMQNYRLIDATLYVTFEPCVMCAGAMIHSRIGRVVFGVRNAKTGAAGSLMDVLHYP GMNHRVEITEGILADECAALLCYFFRMPRQVFNAQKKAQSSTD (SEQ ID NO: 1), or corresponding combinations of alterations in another adenosine deaminase.

[0010] In an embodiment of the above-delineated adenosine deaminase variants, the adenosine deaminase variant includes the following combination of alterations I76Y+V82G+Y147D+F149Y+Q154S+D167N of SEQ ID NO: 1, or corresponding alterations in another adenosine deaminase. In another embodiment, the adenosine deaminase has at least about 90% identity to SEQ ID NO: 1. In another embodiment, the adenosine deaminase has at least about 95% identity to SEQ ID NO: 1. In another embodiment, the adenosine deaminase comprises or consists essentially of SEQ ID NO: 1.

[0011] In another aspect, a fusion protein or complex including a polynucleotide programmable DNA binding domain and at least one adenosine deaminase variant domain is provided, wherein the adenosine deaminase variant domain comprises a glycine (G) at amino acid position 82, a threonine (T) or an aspartic acid (D) at amino acid position 147, a serine (S) at amino acid position 154, and one or more of a histidine (H) at amino acid position 36, a tyrosine at amino acid position 76, a tyrosine at amino acid position 149, a lysine (K) at amino acid position 157, and an asparagine (N) at amino acid position 167 of the following amino acid sequence, wherein the adenosine deaminase has at least about 85% identity to said amino acid sequence MSEVEFSHEYWMRHALTLAKRARDEREVPVGAVLVLNNRVIGEGWNRAIGLHDPTAHAEIMA LRQGGLVMQNYRLIDATLYVTFEPCVMCAGAMIHSRIGRVVFGVRNAKTGAAGSLMDVLHYP GMNHRVEITEGILADECAALLCYFFRMPRQVFNAQKKAQSSTD (SEQ ID NO: 1), or corresponding alterations in another adenosine deaminase. In an embodiment of the fusion protein or complex, the adenosine deaminase variant domain has at least about 90% identity to SEQ ID NO: 1. In another embodiment of the fusion protein or complex, the adenosine deaminase variant domain at least about 95% identity to SEQ ID NO: 1. In another embodiment of the fusion protein or complex, the adenosine deaminase variant domain comprises or consists essentially of SEQ ID NO: 1.

[0012] Yet another aspect provides a fusion protein or complex including a polynucleotide programmable DNA binding domain and at least one adenosine deaminase variant domain, wherein the adenosine deaminase variant domain comprises any of the following combinations of alterations: a) I76Y+V82G+Y147T+Q154S; b) L36H+V82G+Y147T+Q154S+N157K; c) V82G+Y147D+F149Y+Q154S+D167N; d) L36H+V82G+Y147D+F149Y+Q154S+N157K+D167N; e) L36H+I76Y+V82G+Y147T+Q154S+N157K; f) I76Y+V82G+Y147D+F149Y+Q154S+D167N; g) Y147D+F149Y+D167N; h) L36H; I76Y; V82G; Q154S; and N157K; i) I76Y; V82G; Q154S; or j) L36H+I76Y+V82G+Y147D+F149Y+Q154S+N157K+D167N with reference to SEQ ID NO: 1: MSEVEFSHEYWMRHALTLAKRARDEREVPVGAVLVLNNRVIGEGWNRAIGLHDPTAHAEIMA LRQGGLVMQNYRLIDATLYVTFEPCVMCAGAMIHSRIGRVVFGVRNAKTGAAGSLMDVLHYP GMNHRVEITEGILADECAALLCYFFRMPRQVFNAQKKAQSSTD (SEQ ID NO: 1), or corresponding combinations of alterations in another adenosine deaminase.

[0013] In some embodiments of the above-delineated fusion protein or complex, the adenosine deaminase variant includes the following combination of alterations I76Y+V82G+Y147D+F149Y+Q154S+D167N of SEQ ID NO: 1, or corresponding alterations in another adenosine deaminase. In some embodiments, the fusion protein or complex includes one adenosine deaminase variant domain. In some embodiments, the fusion protein or complex includes a wild-type adenosine deaminase domain and an adenosine deaminase variant domain. In some embodiments, the fusion protein or complex includes a TadA*7.10 adenosine deaminase domain and an adenosine deaminase variant domain. In some embodiments, the polynucleotide programmable DNA binding domain is a Cas9 domain. In some embodiments, the Cas9 domain comprises a nuclease dead Cas9 (dCas9), a Cas9 nickase (nCas9), or a nuclease active Cas9. In some embodiments, the polynucleotide programmable DNA binding domain is a Staphylococcus aureus Cas9 (SaCas9), Streptococcus thermophilus 1 Cas9 (St1Cas9), a Streptococcus pyogenes Cas9 (SpCas9), or variants thereof. In some embodiments, the polynucleotide programmable DNA binding domain comprises a modified SaCas9 having an altered protospacer-adjacent motif (PAM) specificity. In some embodiments, the SaCas9 has protospacer-adjacent motif (PAM) specificity for the nucleic acid sequence 5′-NNGRRT-3′. In some embodiments, the SaCas9 has specificity for the nucleic acid sequence 5′-GAGAAT-3′. In some embodiments, the SaCas9 is a nuclease active SaCas9, a nuclease inactive SaCas9 (SaCas9d), or a SaCas9 nickase (SaCas9n). In some embodiments, the SaCas9 is a nickase comprising an amino acid substitution N579A or a corresponding amino acid substitution thereof. In some embodiments, the SaCas9 is a Streptococcus pyogenes Cas9 (SpCas9) or a variant thereof. In some embodiments of the above-delineated fusion protein or complex, the adenosine deaminase variant is capable of deaminating adenine in deoxyribonucleic acid (DNA). In some embodiments, the fusion protein or complex further includes a linker between the polynucleotide programmable DNA binding domain and the adenosine deaminase variant domain. In some embodiments, the linker comprises the amino acid sequence: SGGSSGGSSGSETPGTSESATPES (SEQ ID NO: 359). In some embodiments, the fusion protein or complex includes one or more nuclear localization signal. In some embodiments, the nuclear localization signal is a bipartite nuclear localization signal. In some embodiments, the polynucleotide programmable DNA binding domain non-covalently associates with the deaminase.

[0014] Another aspect provides a base editor system including any of the fusion proteins or complexes as provided herein and one or more guide polynucleotides. In some embodiments, the one or more guide polynucleotides target the fusion protein to effect an A·T to G·C alteration of a single nucleotide polymorphism (SNP) associated with a genetic disease. In some embodiments, the genetic disease is Glycogen Storage Disease Type 1a (GSD1a). In some embodiments, the guide polynucleotide comprises ribonucleic acid (RNA), or deoxyribonucleic acid (DNA). In some embodiments, the guide polynucleotide comprises a nucleic acid sequence: 5′-CAGUAUGGACACUGUCCAAA-3′ (SEQ ID NO: 370). In some embodiments, the guide comprises or consists of one of the following nucleic acid sequences: CACCAGUAUGGACACUGUCCAAAGUUUUAGUACUCUGUAAUGAAAAUUACAGAAUCUACUAA AACAAGGCAAAAUGCCGUGUUUAUCUCGUCAACUUGUUGGCGAGAUUUU (SEQ ID NO: 409), or CCACCAGUAUGGACACUGUCCAAAGUUUUAGUACUCUGUAAUGAAAAUUACAGAAUCUACUA AAACAAGGCAAAAUGCCGUGUUUAUCUCGUCAACUUGUUGGCGAGAUUUU (SEQ ID NO: 410). In some embodiments, the guide polynucleotide comprises one or more modified nucleosides at the 5′ end and/or the 3′ end of the guide. In some embodiments, the guide polynucleotide comprises two, three, four or more modified nucleosides at the 5′ end and/or the 3′ end of the guide. In some embodiments, the guide polynucleotide comprises two, three, four or more modified nucleosides at the 5′ end and/or the 3′ end of the guide. In some embodiments, the guide polynucleotide comprises four modified nucleosides at the 5′ end and four modified nucleosides at the 3′ end of the guide. In some embodiments, the modified nucleoside comprises a 2′ O-methyl or a phosphorothioate. In some embodiments, the guide polynucleotide comprises or consists essentially of one of the following sequences: mCsmAsmCsCAGUAUGGACACUGUCCAAAGUUUUAGUACUCUGUAAUGAAAAUUACAGAAUC UACUAAAACAAGGCAAAAUGCCGUGUUUAUCUCGUCAACUUGUUGGCGAGAmUsmUsmUsU (SEQ ID NO: 409) or mCsmCsmAsCCAGUAUGGACACUGUCCAAAGUUUUAGUACUCUGUAAUGAAAAUUACAGAAU CUACUAAAACAAGGCAAAAUGCCGUGUUUAUCUCGUCAACUUGUUGGCGAGAmUsmUsmUsU (SEQ ID NO: 410), wherein “m” denotes a 2′ O-methyl and the “s” denotes a phosphorothioate. In some embodiments, the guide polynucleotide comprises a nucleic acid sequence: 5′-CAGUAUGGACACUGUCCAAA-3′ (SEQ ID NO: 370). In some embodiments, the guide polynucleotide comprises a nucleic acid sequence, from 5′ to 3′, as follows: CCACCAGUAUGGACACUGUC (SEQ ID NO: 371); CACCAGUAUGGACACUGUCC (SEQ ID NO: 372); ACCAGUAUGGACACUGUCCA (SEQ ID NO: 373); CCAGUAUGGACACUGUCCAA (SEQ ID NO: 374); CAGUAUGGACACUGUCCAAA (SEQ ID NO: 370); AGUAUGGACACUGUCCAAAG (SEQ ID NO: 375); GUAUGGACACUGUCCAAAGA (SEQ ID NO: 376); or UAUGGACACUGUCCAAAGAG (SEQ ID NO: 377). In some embodiments, the adenosine deaminase variant domain is internal to the Cas protein.

[0015] Another aspect provides a polynucleotide encoding any of the adenosine deaminase variants as provided herein, any of the fusion proteins or complexes as provided herein, or any of the base editor systems as provided herein. In an embodiment, the polynucleotide comprises one or more modified nucleosides or nucleotides. In an embodiment, the polynucleotide is DNA or RNA. In embodiments, the polynucleotide comprises a modification selected from the group consisting of 2′O-methyl (2′-OMe), phosphorothioate (PS), 2′O-methyl thioPACE (MSP), 2′O-methyl-PACE (MP), 2′-fluoro RNA (2′-F-RNA), and constrained ethyl (S-cEt).

[0016] Another aspect provides a cell including any of the polynucleotides as provided herein.

[0017] Yet another aspect provides a cell including any of the adenosine deaminase variants as provided herein, any of the fusion proteins or complexes as provided herein and one or more guide polynucleotides, any of the base editor systems as provided herein, or any of the polynucleotides as provided herein.

[0018] In some embodiments of the above-delineated aspects, the cell is a hepatocyte, a hepatocyte precursor, or an iPSc-derived hepatocyte. In some embodiments, the cell expresses a G6PC polypeptide. In some embodiments, the cell is from a subject having Glycogen Storage Disease Type 1a (GSD1a). In some embodiments, the cell is a mammalian cell in vivo, ex vivo, or in vitro. In some embodiments, the cell is a human cell. In some embodiments, the fusion protein and the one or more guide polynucleotides form a complex in the cell.

[0019] In another aspect, a method of treating a genetic disease in a subject in need thereof is provided, in which the method involves administering to a cell of the subject any of the base editor systems as provided herein or a polynucleotide encoding the base editor system.

[0020] In another aspect, a method of treating a genetic disease in a subject in need thereof is provided, in which the method involves administering to the subject any of the cells as provided herein.

[0021] In some embodiments of the above-delineated methods, after treatment the cell expresses a G6PC polypeptide capable of catalyzing the hydrolysis of D-glucose 6-phosphate to D-glucose and orthophosphate. In some embodiments, the cell is autologous, allogeneic, or xenogeneic to the subject. In some embodiments, the genetic disease is Glycogen Storage Disease Type 1a (GSD1a) and/or symptoms thereof. In an embodiment of the above-denoted treatment methods, the subject sustains at least a 24 hour fasting period after treatment.

[0022] In another aspect, a method for correcting a single nucleotide polymorphism (SNP) in a polynucleotide is provided, in which the method involves contacting a target nucleotide sequence, at least a portion of which is located in the polynucleotide or its reverse complement, with any of the base editor systems as provided herein; and editing the SNP by deaminating the SNP or its complement nucleobase upon targeting of the base editor to the target nucleotide sequence, wherein deaminating the SNP or its complement nucleobase corrects the SNP. In some embodiments, the SNP is associated with Glycogen Storage Disease Type 1a (GSD1a). In some embodiments, the SNP is in the G6PC gene.

[0023] In another aspect, a method of editing a glucose-6-phosphatase (G6PC) polynucleotide comprising a single nucleotide polymorphism (SNP) associated with Glycogen Storage Disease Type 1a (GSD1a) is provided, in which the method includes contacting the G6PC polynucleotide with any of the fusion proteins or complexes as provided herein in a complex with one or more guide polynucleotides, and wherein one or more of said guide polynucleotides target said base editor to effect an A·T to G·C alteration of the SNP associated with GSD1a.

[0024] In some embodiments of the above-delineated methods, the contacting is in a cell, a eukaryotic cell, a mammalian cell, or human cell. In some embodiments, the SNP changes a glutamine (Q) to a non-glutamine (X) amino acid or changes an arginine (R) to a non-arginine (X) in a G6PC polypeptide. In some embodiments, the SNP results in expression of an G6PC polypeptide having a non-glutamine (X) amino acid at position 347 or a non-arginine (X) amino acid at position 83. In some embodiments, the base editor correction replaces the non-glutamine amino acid (X) at position 347 with a glutamine or the non-arginine amino acid (X) at position 83 with an arginine (R). In some embodiments, the SNP results in expression of a G6PC polypeptide that prematurely terminates at amino acid position 347 or at a cysteine at position 83. In some embodiments, the SNP encodes one or more of Q347X and/or R83C. In some embodiments, the SNP encodes R83C. In some embodiments, the editing results in less than 0.5% indel formation. In some embodiments, the editing rescues G6PC catalytic activity. In some embodiments, the guide polynucleotide comprises a nucleic acid sequence: 5′-CAGUAUGGACACUGUCCAAA-3′ (SEQ ID NO: 370). In some embodiments, the guide polynucleotide comprises a nucleic acid sequence, from 5′ to 3′, as follows: CCACCAGUAUGGACACUGUC (SEQ ID NO: 371); CACCAGUAUGGACACUGUCC (SEQ ID NO: 372); ACCAGUAUGGACACUGUCCA (SEQ ID NO: 373); CCAGUAUGGACACUGUCCAA (SEQ ID NO: 374); CAGUAUGGACACUGUCCAAA (SEQ ID NO: 370); AGUAUGGACACUGUCCAAAG (SEQ ID NO: 375); GUAUGGACACUGUCCAAAGA (SEQ ID NO: 376); or UAUGGACACUGUCCAAAGAG (SEQ ID NO: 377). In some embodiments of the methods, the subject sustains at least a 24 hour fasting period after treatment.

[0025] Another aspect provides a vector comprising any of the polynucleotides as provided and described herein. In some embodiments, the vector is a viral vector. In some embodiments, the viral vector is a retroviral vector, adenoviral vector, lentiviral vector, herpesvirus vector, or adeno-associated viral vector (AAV).

[0026] Another aspect provides a composition including any of the fusion proteins or complexes as provided herein, any of the base editor systems as provided herein, any of the polynucleotides as provided herein, any of the cells as provided herein, or any of the vectors as provided herein. In some embodiments, the composition further includes a pharmaceutically acceptable excipient, carrier, or vehicle. In some embodiments, the one or more guide polynucleotides and the fusion protein are formulated together or separately. In some embodiments, the composition further includes a ribonucleoparticle suitable for expression in a mammalian cell. In some embodiments, the composition further includes a lipid. In some embodiments, the composition comprises a lipid nanoparticle (LNP).

[0027] Yet another aspect provides a kit including any of the fusion proteins or complexes as provided herein, any of the base editor systems as provided herein, any of the polynucleotides as provided herein, any of the cells as provided herein, any of the vectors as provided herein, or any of the compositions as provided herein. In some embodiments, the kit further includes written instructions for the use of the kit in the treatment of Glycogen Storage Disease Type 1a (GSD1a).

[0028] Another aspect provides any of the fusion proteins or complexes as provided and described herein, any of the base editor systems as provided and described herein, any of the polynucleotides as provided and described herein, any of the cells as provided and described herein, any of the vectors as provided and described herein, or any of the compositions as provided and described herein, wherein the base editor comprises an mRNA sequence as set forth in SEQ ID NO: 396.

[0029] Another aspect provides any of the fusion proteins or complexes as provided and described herein, any of the base editor systems as provided and described herein, any of the polynucleotides as provided and described herein, any of the cells as provided and described herein, any of the vectors as provided and described herein, or any of the compositions as provided and described herein, wherein the base editor comprises a DNA sequence as set forth in SEQ ID NO: 397.

[0030] Another aspect provides any of the fusion proteins or complexes as provided and described herein, any of the base editor systems as provided and described herein, any of the polynucleotides as provided and described herein, any of the cells as provided and described herein, any of the vectors as provided and described herein, or any of the compositions as provided and described herein, wherein the base editor comprises an amino acid sequence as set forth in SEQ ID NO: 398.

[0031] In another aspect, a modified guide RNA (gRNA) comprising modified nucleotides is provided, wherein the gRNA comprises from 5′ to 3′ a polynucleotide sequence selected from the group consisting of:

(SEQ ID NO: 404)
CAGUAUGGACACUGUCCAAAGUUUUAGUACUCUGUAAUGAAAAUUACA
GAAUCUACUAAAACAAGGCAAAAUGCCGUGUUUAUCUCGUCAACUUGU
UGGCGAGAUUUU;
(SEQ ID NO: 405)
UUUCAGUAUGGACACUGUCCAAAGUUUUAGUACUCUGUAAUGAAAAUU
ACAGAAUCUACUAAAACAAGGCAAAAUGCCGUGUUUAUCUCGUCAACU
UGUUGGCGAGAUUUU;
(SEQ ID NO: 406)
CAGUAUGGACACUGUCCAAAGUUUUAGUACUCUGGAAACAGAAUCUAC
UAAAACAAGGCAAAAUGCCGUGUUUAUCUCGUCAACUUGUUGGCGAGA
UUUU;
(SEQ ID NO: 407)
CCAGUAUGGACACUGUCCAAAGUUUUAGUACUCUGUAAUGAAAAUUAC
AGAAUCUACUAAAACAAGGCAAAAUGCCGUGUUUAUCUCGUCAACUUG
UUGGCGAGAUUUU;
(SEQ ID NO: 408)
ACCAGUAUGGACACUGUCCAAAGUUUUAGUACUCUGUAAUGAAAAUUA
CAGAAUCUACUAAAACAAGGCAAAAUGCCGUGUUUAUCUCGUCAACUU
GUUGGCGAGAUUUU;
(SEQ ID NO: 409)
CACCAGUAUGGACACUGUCCAAAGUUUUAGUACUCUGUAAUGAAAAUU
ACAGAAUCUACUAAAACAAGGCAAAAUGCCGUGUUUAUCUCGUCAACU
UGUUGGCGAGAUUUU;
(SEQ ID NO: 410)
CCACCAGUAUGGACACUGUCCAAAGUUUUAGUACUCUGUAAUGAAAAU
UACAGAAUCUACUAAAACAAGGCAAAAUGCCGUGUUUAUCUCGUCAAC
UUGUUGGCGAGAUUUU;
(SEQ ID NO: 411)
CAGUAUGGACACUGUCCAAAGUUUUAGUACUCUGUAGAAAUACAGAAU
CUACUAAAACAAGGCAAAAUGCCGUGUUUAUCUCGUCAACUUGUUGGC
GAGAUUUU;
(SEQ ID NO: 412)
CAGUAUGGACACUGUCCAAAGUUUUAGUACUCUGCGGAAACGCAGAAU
CUACUAAAACAAGGCAAAAUGCCGUGUUUAUCUCGUCAACUUGUUGGC
GAGAUUUU;
(SEQ ID NO: 413)
CAGUAUGGACACUGUCCAAAGUUUUAGUACUCGAAAGAAUCUACUAAA
ACAAGGCAAAAUGCCGUGUUUAUCUCGUCAACUUGUUGGCGAGAUUUU;
(SEQ ID NO: 414)
CAGUAUGGACACUGUCCAAAGUUUUAGUACCCGAAAGCAUCUACUAAA
ACAAGGCAAAAUGCCGUGUUUAUCUCGUCAACUUGUUGGCGAGAUUUU;
and
(SEQ ID NO: 415)
CAGUAUGGACACUGUCCAAAGUUUUAGUACUCUGUAAUGAAAAUUACA
GAAUCUACUAAAACAAGGCAAAAUGCCGUGUUUAUCUCGUCAACUUGU
UGGCGAGAUUUU.

[0032] In some embodiments, the guide comprises at least about 50%-75% modified nucleotides. In some embodiments, the guide comprises at least about 85% or more modified nucleotides. In some embodiments, at least about 1-5 nucleotides at the 5′ end of the gRNA are modified and at least about 1-5 nucleotides at the 3′ end of the gRNA are modified. In some embodiments, at least about 3-5 contiguous nucleotides at each of the 5′ and 3′ termini of the gRNA are modified. In some embodiments, at least about 20% of the nucleotides present in a direct repeat or anti-direct repeat are modified. In some embodiments, at least about 50% of the nucleotides present in a direct repeat or anti-direct repeat are modified. In some embodiments, at least about 50-75% of the nucleotides present in a direct repeat or anti-direct repeat are modified. In some embodiments, at least about 100 of the nucleotides present in a direct repeat or anti-direct repeat are modified. In some embodiments, at least about 20% or more of the nucleotides present in a hairpin present in the gRNA scaffold are modified. In some embodiments, at least about 50% or more of the nucleotides present in a hairpin present in the gRNA scaffold are modified. In some embodiments, the guide comprises a variable length protospacer. In some embodiments, the guide comprises a 20-40 nucleotide protospacer. In some embodiments, the guide comprises a protospacer comprising at least about 20-25 nucleotides or at least about 30-35 nucleotides. In some embodiments, the protospacer comprises modified nucleotides. In some embodiments, the guide comprises two or more of the following:
[0033] at least about 1-5 nucleotides at the 5′ end of the gRNA are modified and at least about 1-5 nucleotides at the 3′ end of the gRNA are modified;
[0034] at least about 20% of the nucleotides present in a direct repeat or anti-direct repeat are modified;
[0035] at least about 50-75% of the nucleotides present in a direct repeat or anti-direct repeat are modified;
[0036] at least about 20% or more of the nucleotides present in a hairpin present in the gRNA scaffold are modified;
[0037] a variable length protospacer; and
[0038] a protospacer comprising modified nucleotides.

[0039] In some embodiments of the modified gRNA, the gRNA comprises one or more modifications selected from the group consisting of 2′-O-methyl (2′-OMe), phosphorothioate (PS), 2′-O-methyl thioPACE (MSP), 2′-O-methyl-PACE (MP), 2′-fluoro RNA (2′-F-RNA), and constrained ethyl (S-cEt). In embodiments, the gRNA comprises 2′O-methyl or phosphorothioate modifications. In an embodiment, the gRNA comprises 2′-O-methyl and phosphorothioate modifications. In an embodiment, the modifications increase base editing by at least about 2 fold.

[0040] In another aspect, a modified guide RNA (gRNA) is provided, wherein the gRNA comprises a nucleic acid sequence, from 5′ to 3′, selected from

(SEQ ID NO: 404)
mCsmAsmGsmUAUmGmGmACAmCUGUCCAAAmGUUUUmAmGmUACUCm
UGmUmAmAmUGmAAAmAmUmUmACmAGAAUCUACmUmAAAACAAGGCA
AmAAUGmCCmGUGUmUmUmAmUmCmUmCmGmUmCmAmAmCmUmUmGmU
mUmGmGmCmGmAmGmAmUsmUsmUsmU;
(SEQ ID NO: 405)
mUsmUsmUsCAGmUAUmGmGmACAmCUGUCCAAAmGUUUUmAmGmUAC
UCmUGmUmAmAmUGmAAAmAmUmUmACmAGAAUCUACmUmAAAACAAG
GCAAmAAUGmCCmGUGUmUmUmAmUmCmUmCmGmUmCmAmAmCmUmUm
GmUmUmGmGmCmGmAmGmAmUsmUsmUsmU;
(SEQ ID NO: 404)
mCsmAsGsmUAUmGmGmAmCAmCmUGUCCAAmAmGUmUUmUmAmGmUA
CUmCmUmGmUmAmAmUGmAmAmAmAmUmUmACmAmGAAmUCUACmUmA
mAAACAAGmGCAAmAAUGmCmCmGUGmUmUmUmAmUmCmUmCmGmUmC
mAmAmCmUmUmGmUmUmGmGmCmGmAmGmAmUsmUsmUsmU;
(SEQ ID NO: 404)
mCsmAsGsmUmAUmGmGmAmCAmCUGUCCAAmAmGUUUmUAmGmUACU
mCmUmGmUmAmAmUmGmAmAmAmAmUmUmAmCmAmGmAAmUCUACUmA
mAAACAAmGmGmCmAmAmAAUmGmCmCGUGmUmUmUmAmUmCmUmCmG
mUmCmAmAmCmUmUmGmUmUmGmGmCmGmAmGmAmUsmUsmUsmU;
or
(SEQ ID NO: 404)
mCsmAsGsmUmAUmGmGmAmCAmCmUGUCmCmAAmAmGmUmUmUmUmA
mGmUAmCmUmCmUmGmUmAmAmUmGmAmAmAmAmUmUmAmCmAmGmAm
AmUCUACmUmAmAmAAmCAmAmGmGmCmAmAmAAUmGmCmCmGmUGmU
mUmUmAmUmCmUmCmGmUmCmAmAmCmUmUmGmUmUmGmGmCmGmAmG
mAmUsmUsmUsmU.

[0041] In another aspect, a modified guide RNA (gRNA) is provided, which comprises a nucleic acid sequence, from 5′ to 3′, selected from

(SEQ ID NO: 404)
mCsmAsmGsUAUGGACACUGUCCAAAGUUUUAGUACmUmCmUmGmUmA
mAmUmGmAmAmAmAmUmUmAmCmAmGmAAUCUACUAAAACAAGGCAAA
AUGCCGUGUUUAUCUCGUCAACUUGUUGGCGAGAUsmUsmUsmU;
(SEQ ID NO: 404)
mCsmAsmGsUAUGGACACUGUCCAAAGUUUUAGUACmUmCmUmGmUmA
mAmUmGmAmAmAmAmUmUmAmCmAmGmAAUCUACUAAAACAAGGCAAA
AUGCCGUGUmUmUmAmUmCmUmCmGmUmCmAmAmCmUmUmGmUmUmGm
GmCmGmAmGmAmUsmUsmUsmU;
(SEQ ID NO: 404)
mCsmAsmGsmUAUmGmGmACAmCUGUCCAAAmGUUUUAGUACmUmCmU
mGmUmAmAmUmGmAmAmAmAmUmUmAmCmAmGmAAUCUACUAAAACAA
GGCAAAAUGCCmGUGUmUmUAmUmCmUmCmGmUmCmAmAmCmUmUmGm
UmUmGmGmCmGmAmGmAUsmUsmUsmU;
(SEQ ID NO: 406)
mCsmAsmGsUAUGGACACUGUCCAAAGUUUUAGUACmUmCmUmGGmAm
AmAmCmAmGmAAUCUACUAAAACAAGGCAAAAUGCCGUGUmUmUmAmU
mCmUmCmGmUmCmAmAmCmUmUmGmUmUmGmGmCmGmAmGmAmUsmUs
mUsmU;
or
(SEQ ID NO: 406)
mCsmAsmGsmUAUmGmGmACAmCUGUCCAAAmGUUUUAGUACmUmCmU
mGmGmAmAmAmCmAmGmAAUCUACUAAAACAAGGCAAAAUGCCmGUGU
mUmUAmUmCmUmCmGmUmCmAmAmCmUmUmGmUmUmGmGmCmGmAmGm
AUsmUsmUsmU.

[0042] In another aspect, a modified guide RNA (gRNA) is provided, which comprises a nucleic acid sequence, from 5′ to 3′, selected from

(SEQ ID NO: 407)
mCsmCsmAsGUAUGGACACUGUCCAAAGUUUUAGUACUCUGUAAUGAAA
AUUACAGAAUCUACUAAAACAAGGCAAAAUGCCGUGUUUAUCUCGUCAA
CUUGUUGGCGAGAmUsmUsmUsU;
(SEQ ID NO: 408)
mAsmCsmCsAGUAUGGACACUGUCCAAAGUUUUAGUACUCUGUAAUGAA
AAUUACAGAAUCUACUAAAACAAGGCAAAAUGCCGUGUUUAUCUCGUCA
ACUUGUUGGCGAGAmUsmUsmUsU;
(SEQ ID NO: 409)
mCsmAsmCsCAGUAUGGACACUGUCCAAAGUUUUAGUACUCUGUAAUGA
AAAUUACAGAAUCUACUAAAACAAGGCAAAAUGCCGUGUUUAUCUCGUC
AACUUGUUGGCGAGAmUsmUsmUsU;
or
(SEQ ID NO: 410)
mCsmCsmAsCCAGUAUGGACACUGUCCAAAGUUUUAGUACUCUGUAAUG
AAAAUUACAGAAUCUACUAAAACAAGGCAAAAUGCCGUGUUUAUCUCGU
CAACUUGUUGGCGAGAmUsmUsmUsU.

[0043] In another aspect, a modified guide RNA (gRNA) is provided, which comprises a nucleic acid sequence, from 5′ to 3′, selected from

(SEQ ID NO: 411)
mCsmAsmGsUAUGGACACUGUCCAAAGUUUUAGUACUCUGUAGAAAUAC
AGAAUCUACUAAAACAAGGCAAAAUGCCGUGUUUAUCUCGUCAACUUGU
UGGCGAGAUsmUsmUsmU;
(SEQ ID NO: 412)
mCsmAsmGsUAUGGACACUGUCCAAAGUUUUAGUACUCUGCGGAAACGC
AGAAUCUACUAAAACAAGGCAAAAUGCCGUGUUUAUCUCGUCAACUUGU
UGGCGAGAUsmUsmUsmU;
(SEQ ID NO: 406)
mCsmAsmGsUAUGGACACUGUCCAAAGUUUUAGUACUCUGGAAACAGAA
UCUACUAAAACAAGGCAAAAUGCCGUGUUUAUCUCGUCAACUUGUUGGC
GAGAUsmUsmUsmU;
(SEQ ID NO: 413)
mCsmAsmGsUAUGGACACUGUCCAAAGUUUUAGUACUCGAAAGAAUCUA
CUAAAACAAGGCAAAAUGCCGUGUUUAUCUCGUCAACUUGUUGGCGAGA
UsmUsmUsmU;
or
(SEQ ID NO: 414)
mCsmAsmGsUAUGGACACUGUCCAAAGUUUUAGUACCCGAAAGCAUCUA
CUAAAACAAGGCAAAAUGCCGUGUUUAUCUCGUCAACUUGUUGGCGAGA
UsmUsmUsmU.

[0044] In another aspect, a modified guide RNA (gRNA) is provided, wherein the gRNA comprises a nucleic acid sequence, from 5′ to 3′, selected from

(SEQ ID NO: 415)
mCsmAsmGsUAUGGACACUGUCCAAAGUUUUAGUACUCUGUAAUGAAAA
UUACAGAAUCUACUAAAACAAGGCAAAAUGCCGUGUUUAUCUCGUCAAC
UUGUUGGCGAGAUsmUsmUsmU;
or
(SEQ ID NO: 415)
mCsmAsmGsUAUGGACACUGUCCAAAGUUUUAGUACUCUGUAAUGAAAA
UUACAGAAUCUACUAAAACAAGGCAAAAUGCCGUGUUUAUCUCGUCAAC
UUGUUGGCGAGAmUsmUsmUsU.

[0045] In the above-delineated modified gRNAs, the “m” denotes a 2′-O-methyl and “s” denotes a phosphorothioate.

[0046] In another aspect, a formulation is provided which comprises a lipid nanoparticle comprising an mRNA expressing a base editor and a gRNA, wherein the base editor comprises a Cas9 domain and at least one adenosine deaminase variant comprising V82G, Y147T/D, Q154S, and one or more of L36H, I76Y, F149Y, N157K, and D167N with reference to SEQ ID NO: 1: MSEVEFSHEYWMRHALTLAKRARDEREVPVGAVLVLNNRVIGEGWNRAIGLHDPTAHAEIMA LRQGGLVMQNYRLIDATLYVTFEPCVMCAGAMIHSRIGRVVFGVRNAKTGAAGSLMDVLHYP GMNHRVEITEGILADECAALLCYFFRMPRQVFNAQKKAQSSTD (SEQ ID NO: 1), or corresponding alterations in another adenosine deaminase; and the gRNA comprises CAGUAUGGACACUGUCCAAA (SEQ ID NO: 370).

[0047] In another aspect, a formulation is provided which comprises a lipid nanoparticle comprising an mRNA expressing a base editor, wherein the base editor comprises a Cas9 domain and at least one adenosine deaminase variant comprising V82G, Y147T/D, Q154S, and one or more of L36H, I76Y, F149Y, N157K, and D167N with reference to SEQ ID NO: 1: MSEVEFSHEYWMRHALTLAKRARDEREVPVGAVLVLNNRVIGEGWNRAIGLHDPTAHAEIMA LRQGGLVMQNYRLIDATLYVTFEPCVMCAGAMIHSRIGRVVFGVRNAKTGAAGSLMDVLHYP GMNHRVEITEGILADECAALLCYFFRMPRQVFNAQKKAQSSTD (SEQ ID NO: 1), or corresponding alterations in another adenosine deaminase; and a gRNA comprising CAGUAUGGACACUGUCCAAA (SEQ ID NO: 370).

[0048] In an embodiment of the above-delineated formulations, the adenosine deaminase variant domain comprises the following combination of alterations I76Y+V82G+Y147D+F149Y+Q154S+D167N of SEQ ID NO: 1, or corresponding alterations in another adenosine deaminase. In some embodiments, the gRNA comprises 2′O-methyl and/or phosphorothioate modifications. In some embodiments, the gRNA comprises 2′-O-methyl and phosphorothioate modifications. In some embodiments, the mRNA comprises one or more pseudouridines. In some embodiments, the mRNA comprises an N1-methylpseudouridine (m1Ψ).

[0049] Other aspects as described herein provide modified guide RNA sequences (gRNAs), (e.g., heavily modified gRNA sequences or “heavy mods”), such as described in Example 5 and as set forth in SEQ ID NOS: 404-415.

### Definitions

[0050] Unless defined otherwise, all technical and scientific terms used herein have the meaning commonly understood by a person skilled in the pertinent art. The following references provide one of skill with a general definition of many of the terms used in this disclosure and the embodiments described herein: Singleton et al., Dictionary of Microbiology and Molecular Biology (2nd ed. 1994); The Cambridge Dictionary of Science and Technology (Walker ed., 1988); The Glossary of Genetics, 5th Ed., R. Rieger et al. (eds.), Springer Verlag (1991); and Hale & Marham, The Harper Collins Dictionary of Biology (1991).

[0051] In this application, the use of the singular includes the plural unless specifically stated otherwise. It must be noted that, as used in the specification, the singular forms “a,” “an,” and “the” include plural references unless the context clearly dictates otherwise. In this application, the use of “or” means “and/or,” unless stated otherwise, and is understood to be inclusive. Furthermore, use of the term “including” as well as other forms, such as “include,” “includes,” and “included,” is not limiting.

[0052] As used in this specification and claim(s), the words “comprising” (and any form of comprising, such as “comprise” and “comprises”), “having” (and any form of having, such as “have” and “has”), “including” (and any form of including, such as “includes” and “include”) or “containing” (and any form of containing, such as “contains” and “contain”) are inclusive or open-ended and do not exclude additional, unrecited elements or method steps. Any embodiments specified as “comprising” a particular component(s) or element(s) are also contemplated as “consisting of” or “consisting essentially of” the particular component(s) or element(s) in some embodiments. It is contemplated that any embodiment discussed in this specification can be implemented with respect to any method or composition of the present disclosure, and vice versa. Furthermore, compositions of the present disclosure can be used to achieve methods of the present disclosure.

[0053] The term “about” or “approximately” means within an acceptable error range for the particular value as determined by one of ordinary skill in the art. Such acceptable range will depend in part on how the value is measured or determined, i.e., the limitations of the measurement system.

[0054] Ranges provided herein are understood to be shorthand for all of the values within the range. For example, a range of 1 to 50 is understood to include any number, combination of numbers, or sub-range from the group consisting 1, 2, 3, 4, 5, 6, 7, 8, 9, 10, 11, 12, 13, 14, 15, 16, 17, 18, 19, 20, 21, 22, 23, 24, 25, 26, 27, 28, 29, 30, 31, 32, 33, 34, 35, 36, 37, 38, 39, 40, 41, 42, 43, 44, 45, 46, 47, 48, 49, or 50.

[0055] Reference in the specification to “some embodiments,” “an embodiment,” “one embodiment” or “other embodiments” means that a particular feature, structure, or characteristic described in connection with the embodiments is included in at least some embodiments, but not necessarily all embodiments, of the present disclosures.

[0056] By “adenine” or “9H-Purin-6-amine” is meant a purine nucleobase with the molecular formula C₅H₅N₅, having the structure

[chemical structure]

and corresponding to CAS No. 73-24-5.

[0057] By “adenosine” or “4-Amino-1-[(2R,3R,4S,5R)-3,4-dihydroxy-5-(hydroxymethyl)oxolan-2-yl]pyrimidin-2(1H)-one” is meant an adenine molecule attached to a ribose sugar via a glycosidic bond, having the structure

[chemical structure]

and corresponding to CAS No. 65-46-3. Its molecular formula is C₁₀H₁₃N₅O₄.

[0058] By “adenosine deaminase” or “adenine deaminase” is meant a polypeptide or fragment thereof capable of catalyzing the hydrolytic deamination of adenine or adenosine. In some embodiments, the deaminase or deaminase domain is an adenosine deaminase catalyzing the hydrolytic deamination of adenosine to inosine or deoxy adenosine to deoxyinosine. In some embodiments, the adenosine deaminase catalyzes the hydrolytic deamination of adenine or adenosine in deoxyribonucleic acid (DNA). The adenosine deaminases (e.g. engineered adenosine deaminases, evolved adenosine deaminases) provided herein may be from any organism (e.g., eukaryotic, prokaryotic), including but not limited to algae, bacteria, fungi, plants, invertebrates (e.g., insects), and vertebrates (e.g., amphibians, mammals). In some embodiments, the adenosine deaminase is an adenosine deaminase variant with one or more alterations and is capable of deaminating both adenine and cytosine in a target polynucleotide (e.g., DNA, RNA). In some embodiments, the target polynucleotide is single or double stranded. In some embodiments, the adenosine deaminase variant is capable of deaminating both adenine and cytosine in DNA. In some embodiments, the adenosine deaminase variant is capable of deaminating both adenine and cytosine in single-stranded DNA. In some embodiments, the adenosine deaminase variant is capable of deaminating both adenine and cytosine in RNA.

[0059] By “adenosine deaminase activity” is meant catalyzing the deamination of adenine or adenosine to guanine in a polynucleotide. In some embodiments, an adenosine deaminase variant as provided herein maintains adenosine deaminase activity (e.g., at least about 30%, 40%, 50%, 60%, 70%, 80%, 90% or more of the activity of a reference adenosine deaminase (e.g., TadA*8.20 or TadA*8.19)).

[0060] By “Adenosine Base Editor (ABE)” is meant a base editor comprising an adenosine deaminase.

[0061] By “Adenosine Base Editor 8 (ABE8) polypeptide” or “ABE8” is meant a base editor as defined herein comprising an adenosine deaminase variant comprising an alteration at amino acid position 82 and/or 166 of the following reference sequence: MSEVEFSHEYWMRHALTLAKRARDEREVPVGAVLVLNNRVIGEGWNRAIGLHDPTAHAEIMA LRQGGLVMQNYRLIDATLYVTFEPCVMCAGAMIHSRIGRVVFGVRNAKTGAAGSLMDVLHYP GMNHRVEITEGILADECAALLCYFFRMPRQVFNAQKKAQSSTD (SEQ ID NO: 1). In some embodiments, ABE8 comprises further alterations, as described herein, relative to the reference sequence.

[0062] By “Adenosine Base Editor 8 (ABE8) polynucleotide” is meant a polynucleotide encoding an ABE8 polypeptide.

[0063] By “Adenosine Deaminase polynucleotide” is meant a polynucleotide encoding an adenosine deaminase polypeptide. In particular embodiments, the adenosine deaminase polynucleotide encodes an adenosine deaminase variant comprising V82G, Y147T/D, Q154S, and one or more of L36H, I76Y, F149Y, N157K, and D167N. In some embodiments, the adenosine deaminase polynucleotide encodes an adenosine deaminase variant comprising one of the following combinations of alterations: V82G+Y147T+Q154S; I76Y+V82G+Y147T+Q154S; L36H+V82G+Y147T+Q154S+N157K; V82G+Y147D+F149Y+Q154S+D167N; L36H+V82G+Y147D+F149Y+Q154S+N157K+D167N; L36H+I76Y+V82G+Y147T+Q154S+N157K; I76Y+V82G+Y147D+F149Y+Q154S+D167N; or L36H+I76Y+V82G+Y147D+F149Y+Q154S+N157K+D167N.

[0064] In some embodiments, the deaminase or deaminase domain is a variant of a naturally occurring deaminase from an organism, such as a human, chimpanzee, gorilla, monkey, cow, dog, rat, or mouse. In some embodiments, the deaminase or deaminase domain does not occur in nature. For example, in some embodiments, the deaminase or deaminase domain is at least 50%, at least 55%, at least 60%, at least 65%, at least 70%, at least 75% at least 80%, at least 85%, at least 90%, at least 91%, at least 92%, at least 93%, at least 94%, at least 95%, at least 96%, at least 97%, at least 98%, at least 99%, at least 99.1%, at least 99.2%, at least 99.3%, at least 99.4%, at least 99.5%, at least 99.6%, at least 99.7%, at least 99.8%, or at least 99.9% identical to a naturally occurring deaminase. In some embodiments, the adenosine deaminase is from a bacterium, such as, E. coli, S. aureus, B. subtilis, S. typhi, S. putrefaciens, H. influenzae, C. crescentus, or G. sulfurreducens.

[0065] In some embodiments, the adenosine deaminase is a TadA deaminase. In some embodiments, the TadA deaminase is an E. coli TadA (ecTadA) deaminase or a fragment thereof. In some embodiments, the ecTadA deaminase is truncated ecTadA. For example, the truncated ecTadA may be missing one or more N-terminal amino acids relative to a full-length ecTadA. In some embodiments, the truncated ecTadA may be missing 1, 2, 3, 4, 5, 6, 7, 8, 9, 10, 11, 12, 13, 14, 15, 6, 17, 18, 19, or 20 N-terminal amino acid residues relative to the full length ecTadA. In some embodiments, the truncated ecTadA may be missing 1, 2, 3, 4, 5, 6, 7, 8, 9, 10, 11, 12, 13, 14, 15, 6, 17, 18, 19, or 20 C-terminal amino acid residues relative to the full length ecTadA. In some embodiments, the ecTadA deaminase does not comprise an N-terminal methionine. In some embodiments, the TadA deaminase is an N-terminal truncated TadA. In particular embodiments, the TadA is any one of the TadAs described in PCT/US2017/045381, which is incorporated herein by reference in its entirety.

[0066] In some embodiments, the TadA deaminase is TadA variant. In some embodiments, the TadA variant is TadA*7.10 comprising V82G, Y147T/D, Q154S, and one or more of L36H, I76Y, F149Y, N157K, and D167N. In some embodiments, the TadA variant is TadA*7.10 comprising a combination of alterations selected from among the following: V82G+Y147T+Q154S; I76Y+V82G+Y147T+Q154S; L36H+V82G+Y147T+Q154S+N157K; V82G+Y147D+F149Y+Q154S+D167N; L36H+V82G+Y147D+F149Y+Q154S+N157K+D167N; L36H+I76Y+V82G+Y147T+Q154S+N157K; I76Y+V82G+Y147D+F149Y+Q154S+D167N; or L36H+I76Y+V82G+Y147D+F149Y+Q154S+N157K+D167N. In some embodiments, the TadA variant is MSP605, MSP680, MSP823, MSP824, MSP825, MSP827, MSP828, or MSP829.

[0067] “Administering” is referred to herein as providing one or more compositions described herein to a patient or a subject.

[0068] By “agent” is meant any small molecule chemical compound, antibody, nucleic acid molecule, or polypeptide, or fragments thereof.

[0069] By “alteration” is meant a change (e.g. increase or decrease) in the structure, expression levels or activity of a gene or polypeptide as detected by standard art known methods such as those described herein. As used herein, an alteration includes a change in a polynucleotide or polypeptide sequence or a change in expression levels, such as a 10% change, a 25% change, a 40% change, a 50% change, or greater.

[0070] By “ameliorate” is meant decrease, suppress, attenuate, diminish, arrest, or stabilize the development or progression of a disease.

[0071] By “analog” is meant a molecule that is not identical, but has analogous functional or structural features. For example, a polynucleotide or polypeptide analog retains the biological activity of a corresponding naturally-occurring polynucleotide or polypeptide, while having certain modifications that enhance the analog's function relative to a naturally occurring polynucleotide or polypeptide. Such modifications could increase the analog's affinity for DNA, efficiency, specificity, protease or nuclease resistance, membrane permeability, and/or half-life, without altering, for example, ligand binding. An analog may include an unnatural nucleotide or amino acid.

[0072] By “base editor (BE),” or “nucleobase editor polypeptide (NBE)” is meant an agent that binds a polynucleotide and has nucleobase modifying activity. In various embodiments, the base editor comprises a nucleobase modifying polypeptide (e.g., a deaminase) and a polynucleotide programmable nucleotide binding domain (e.g., Cas9 or Cpf1) in conjunction with a guide polynucleotide (e.g., guide RNA (gRNA)). Representative nucleic acid and protein sequences of base editors are provided in the Sequence Listing as SEQ ID NOs: 2-11 and 378.

[0073] By “base editing activity” is meant acting to chemically alter a base within a polynucleotide. In one embodiment, a first base is converted to a second base. In one embodiment, the base editing activity is adenosine or adenine deaminase activity, e.g., converting A·T to G·C.

[0074] In some embodiments, base editing activity is assessed by efficiency of editing. Base editing efficiency may be measured by any suitable means, for example, by sanger sequencing or next generation sequencing. In some embodiments, base editing efficiency is measured by percentage of total sequencing reads with nucleobase conversion effected by the base editor, for example, percentage of total sequencing reads with target A·T base pair converted to a G·C base pair or target C·G base pair to a T·A base pair. In some embodiments, base editing efficiency is measured by percentage of total cells with nucleobase conversion effected by the base editor, when base editing is performed in a population of cells.

[0075] The term “base editor system” refers to an intermolecular complex for editing a nucleobase of a target nucleotide sequence. In various embodiments, the base editor (BE) system comprises (1) a polynucleotide programmable nucleotide binding domain, a deaminase domain (e.g., cytidine deaminase or adenosine deaminase) for deaminating nucleobases in the target nucleotide sequence; and (2) one or more guide polynucleotides (e.g., guide RNA) in conjunction with the polynucleotide programmable nucleotide binding domain. In various embodiments, the base editor (BE) system comprises a nucleobase editor domain selected from an adenosine deaminase or a cytidine deaminase, and a domain having nucleic acid sequence specific binding activity. In some embodiments, the base editor system comprises (1) a base editor (BE) comprising a polynucleotide programmable DNA binding domain and a deaminase domain for deaminating one or more nucleobases in a target nucleotide sequence; and (2) one or more guide RNAs in conjunction with the polynucleotide programmable DNA binding domain. In some embodiments, the polynucleotide programmable nucleotide binding domain is a polynucleotide programmable DNA binding domain. In some embodiments, the base editor is a cytidine base editor (CBE). In some embodiments, the base editor is an adenine or adenosine base editor (ABE). In some embodiments, the base editor is an adenine or adenosine base editor (ABE) or a cytidine or cytosine base editor (CBE).

[0076] The term “Cas9” or “Cas9 domain” refers to an RNA guided nuclease comprising a Cas9 protein, or a fragment thereof (e.g., a protein comprising an active, inactive, or partially active DNA cleavage domain of Cas9, and/or the gRNA binding domain of Cas9). A Cas9 nuclease is also referred to sometimes as a casn1 nuclease or a CRISPR (clustered regularly interspaced short palindromic repeat) associated nuclease.

[0077] The term “Cas9” or “Cas9 domain” refers to an RNA guided nuclease comprising a Cas9 protein, or a fragment thereof (e.g., a protein comprising an active, inactive, or partially active DNA cleavage domain of Cas9, and/or the gRNA binding domain of Cas9). A Cas9 nuclease is also referred to sometimes as a Casn1 nuclease or a CRISPR (clustered regularly interspaced short palindromic repeat) associated nuclease. CRISPR is an adaptive immune system that provides protection against mobile genetic elements (viruses, transposable elements and conjugative plasmids). CRISPR clusters contain spacers, sequences complementary to antecedent mobile elements, and target invading nucleic acids. CRISPR clusters are transcribed and processed into CRISPR RNA (crRNA). In type II CRISPR systems correct processing of pre-crRNA requires a trans-encoded small RNA (tracrRNA), endogenous ribonuclease 3 (rnc) and a Cas9 protein. The tracrRNA serves as a guide for ribonuclease 3-aided processing of pre-crRNA. Subsequently, Cas9/crRNA/tracrRNA endonucleolytically cleaves linear or circular dsDNA target complementary to the spacer. The target strand not complementary to crRNA is first cut endonucleolytically, then trimmed 3′-5′ exonucleolytically. In nature, DNA-binding and cleavage typically requires protein and both RNAs. However, single guide RNAs (“sgRNA,” or simply “gRNA”) can be engineered so as to incorporate aspects of both the crRNA and tracrRNA into a single RNA species. See, e.g., Jinek M., et al. Science 337:816-821(2012), the entire contents of which is hereby incorporated by reference. Cas9 recognizes a short motif in the CRISPR repeat sequences (the PAM or protospacer adjacent motif) to help distinguish self versus non-self. Cas9 nuclease sequences and structures are well known to those of skill in the art (see, e.g., “Complete genome sequence of an M1 strain of Streptococcus pyogenes.” Ferretti et al., Proc. Natl. Acad. Sci. U.S.A. 98:4658-4663(2001); “CRISPR RNA maturation by trans-encoded small RNA and host factor RNase III.” Deltcheva E., et al., Nature 471:602-607(2011); and “A programmable dual-RNA-guided DNA endonuclease in adaptive bacterial immunity.” Jinek M., et al., Science 337:816-821(2012), the entire contents of each of which are incorporated herein by reference). Cas9 orthologs have been described in various species, including, but not limited to, S. pyogenes and S. thermophilus. Additional suitable Cas9 nucleases and sequences will be apparent to those of skill in the art based on this disclosure, and such Cas9 nucleases and sequences include Cas9 sequences from the organisms and loci disclosed in Chylinski, Rhun, and Charpentier, “The tracrRNA and Cas9 families of type II CRISPR-Cas immunity systems” (2013) RNA Biology 10:5, 726-737; the entire contents of which are incorporated herein by reference.

[0078] A nuclease-inactivated Cas9 protein may interchangeably be referred to as a “dCas9” protein (for nuclease-“dead” Cas9) or catalytically inactive Cas9. Methods for generating a Cas9 protein (or a fragment thereof) having an inactive DNA cleavage domain are known (See, e.g., Jinek et al., Science. 337:816-821(2012); Qi et al., “Repurposing CRISPR as an RNA-Guided Platform for Sequence-Specific Control of Gene Expression” (2013) Cell. 28; 152(5):1173-83, the entire contents of each of which are incorporated herein by reference). For example, the DNA cleavage domain of Cas9 is known to include two subdomains, the HNH nuclease subdomain and the RuvC1 subdomain. The HNH subdomain cleaves the strand complementary to the gRNA, whereas the RuvC1 subdomain cleaves the non-complementary strand. Mutations within these subdomains can silence the nuclease activity of Cas9. For example, the mutations D10A and H840A completely inactivate the nuclease activity of S. pyogenes Cas9 (Jinek et al., Science. 337:816-821(2012); Qi et al., Cell. 28; 152(5):1173-83 (2013)). In some embodiments, dCas9 corresponds to, or comprises in part or in whole, a Cas9 amino acid sequence having one or more mutations that inactivate the Cas9 nuclease activity. In some embodiments, a dCas9 domain comprises D10A and an H840A mutation or corresponding mutations in another Cas9. In some embodiments, a Cas9 nuclease has an inactive (e.g., an inactivated) DNA cleavage domain, that is, the Cas9 is a nickase, referred to as an “nCas9” protein (for “nickase” Cas9). It should be appreciated that additional Cas9 proteins (e.g., a nuclease dead Cas9 (dCas9), a Cas9 nickase (nCas9), or a nuclease active Cas9), including variants and homologs thereof, are within the scope of this disclosure. Exemplary Cas9 proteins include, without limitation, those provided herein. In some embodiments, the Cas9 protein is a nuclease dead Cas9 (dCas9). In some embodiments, the Cas9 protein is a Cas9 nickase (nCas9). In some embodiments, the Cas9 protein is a nuclease active Cas9.

[0079] In some embodiments, proteins comprising fragments of Cas9 are provided. For example, in some embodiments, a protein comprises one of two Cas9 domains: (1) the gRNA binding domain of Cas9; or (2) the DNA cleavage domain of Cas9. In some embodiments, proteins comprising Cas9 or fragments thereof are referred to as “Cas9 variants.” A Cas9 variant shares homology to Cas9, or a fragment thereof. For example, a Cas9 variant is at least about 70% identical, at least about 80% identical, at least about 90% identical, at least about 95% identical, at least about 96% identical, at least about 97% identical, at least about 98% identical, at least about 99% identical, at least about 99.5% identical, or at least about 99.9% identical to wild-type Cas9. In some embodiments, the Cas9 variant may have 1, 2, 3, 4, 5, 6, 7, 8, 9, 10, 11, 12, 13, 14, 15, 16, 17, 18, 19, 20, 21, 22, 21, 24, 25, 26, 27, 28, 29, 30, 31, 32, 33, 34, 35, 36, 37, 38, 39, 40, 41, 42, 43, 44, 45, 46, 47, 48, 49, 50 or more amino acid changes compared to wild-type Cas9. In some embodiments, the Cas9 variant comprises a fragment of Cas9 (e.g., a gRNA binding domain or a DNA-cleavage domain), such that the fragment is at least about 70% identical, at least about 80% identical, at least about 90% identical, at least about 95% identical, at least about 96% identical, at least about 97% identical, at least about 98% identical, at least about 99% identical, at least about 99.5% identical, or at least about 99.9% identical to the corresponding fragment of wild-type Cas9. In some embodiments, the fragment is at least 30%, at least 35%, at least 40%, at least 45%, at least 50%, at least 55%, at least 60%, at least 65%, at least 70%, at least 75%, at least 80%, at least 85%, at least 90%, at least 95% identical, at least 96%, at least 97%, at least 98%, at least 99%, or at least 99.5% of the amino acid length of a corresponding wild-type Cas9.

[0080] In some embodiments, the fragment is at least 100 amino acids in length. In some embodiments, the fragment is at least 100, 150, 200, 250, 300, 350, 400, 450, 500, 550, 600, 650, 700, 750, 800, 850, 900, 950, 1000, 1050, 1100, 1150, 1200, 1250, or at least 1300 amino acids in length.

[0081] In some embodiments, Cas9 refers to Cas9 from: Corynebacterium ulcerans (NCBI Refs: NC_015683.1, NC_017317.1); Corynebacterium diphtheria (NCBI Refs: NC_016782.1, NC_016786.1); Spiroplasma syrphidicola (NCBI Ref: NC_021284.1); Prevotella intermedia (NCBI Ref: NC_017861.1); Spiroplasma taiwanense (NCBI Ref: NC_021846.1); Streptococcus iniae (NCBI Ref: NC_021314.1); Belliella baltica (NCBI Ref: NC_018010.1); Psychroflexus torquisI (NCBI Ref: NC_018721.1); Streptococcus thermophilus (NCBI Ref: YP_820832.1), Listeria innocua (NCBI Ref: NP_472073.1), Campylobacter jejuni (NCBI Ref: YP_002344900.1) or Neisseria meningitidis (NCBI Ref: YP_002342100.1) or to a Cas9 from any other organism.

[0082] In some embodiments, the Cas9 is from Neisseria meningitidis (Nme). In some embodiments, the Cas9 is Nme1, Nme2 or Nme3. In some embodiments, the PAM-interacting domains for Nme1, Nme2 or Nme3 are N₄GAT, N₄CC, and N₄CAAA, respectively (see e.g., Edraki, A., et al., A Compact, High-Accuracy Cas9 with a Dinucleotide PAM for In Vivo Genome Editing, Molecular Cell (2018)).

[0083] In some embodiments, Cas9 fusion proteins as provided herein comprise the full-length amino acid sequence of a Cas9 protein, e.g., one of the Cas9 sequences provided herein. In other embodiments, however, fusion proteins as provided herein do not comprise a full-length Cas9 sequence, but only one or more fragments thereof. For example, in some embodiments, a Cas9 fusion protein provided herein comprises a Cas9 fragment, wherein the fragment binds crRNA and tracrRNA or sgRNA, but does not comprise a functional nuclease domain, e.g., in that it comprises only a truncated version of a nuclease domain or no nuclease domain at all. Exemplary amino acid sequences of suitable Cas9 domains and Cas9 fragments are provided herein, and additional suitable sequences of Cas9 domains and fragments will be apparent to those of skill in the art.

[0084] In some embodiments, Cas9 refers to a Cas9 from archaea (e.g. nanoarchaea), which constitute a domain and kingdom of single-celled prokaryotic microbes. In some embodiments, Cas9 refers to CasX or CasY, which have been described in, for example, Burstein et al., “New CRISPR-Cas systems from uncultivated microbes.” Cell Res. 2017 Feb. 21. doi: 10.1038/cr.2017.21, the entire contents of which is hereby incorporated by reference. Using genome-resolved metagenomics, a number of CRISPR-Cas systems were identified, including the first reported Cas9 in the archaeal domain of life. This divergent Cas9 protein was found in little-studied nanoarchaea as part of an active CRISPR-Cas system. In bacteria, two previously unknown systems were discovered, CRISPR-CasX and CRISPR-CasY, which are among the most compact systems yet discovered. In some embodiments, Cas9 refers to CasX, or a variant of CasX. In some embodiments, Cas9 refers to a CasY, or a variant of CasY. It should be appreciated that other RNA-guided DNA binding proteins may be used as a nucleic acid programmable DNA binding protein (napDNAbp), and are within the scope of this disclosure.

[0085] In particular embodiments, napDNAbps useful in the methods described herein include circular permutants, which are known in the art and described, for example, by Oakes et al., Cell 176, 254-267, 2019.

[0086] “Co-administration” or “co-administered” refers to administering two or more therapeutic agents or pharmaceutical compositions during a course of treatment. Such co-administration can be simultaneous administration or sequential administration. Sequential administration of a later-administered therapeutic agent or pharmaceutical composition can occur at any time during the course of treatment after administration of the first pharmaceutical composition or therapeutic agent.

[0087] The term “conservative amino acid substitution” or “conservative mutation” refers to the replacement of one amino acid by another amino acid with a common property. A functional way to define common properties between individual amino acids is to analyze the normalized frequencies of amino acid changes between corresponding proteins of homologous organisms (Schulz, G. E. and Schirmer, R. H., Principles of Protein Structure, Springer-Verlag, New York (1979)). According to such analyses, groups of amino acids can be defined where amino acids within a group exchange preferentially with each other, and therefore resemble each other most in their impact on the overall protein structure (Schulz, G. E. and Schirmer, R. H., supra). Non-limiting examples of conservative mutations include amino acid substitutions of amino acids, for example, lysine for arginine and vice versa such that a positive charge can be maintained; glutamic acid for aspartic acid and vice versa such that a negative charge can be maintained; serine for threonine such that a free —OH can be maintained; and glutamine for asparagine such that a free —NH₂ can be maintained.

[0088] The term “coding sequence” or “protein coding sequence” as used interchangeably herein refers to a segment of a polynucleotide that codes for a protein. Coding sequences can also be referred to as open reading frames. The region or sequence is bounded nearer the 5′ end by a start codon and nearer the 3′ end with a stop codon. Stop codons useful with the base editors described herein include the following:
[0089] Glutamine CAG→TAG Stop codon
   [0090] CAA→TAA
[0091] Arginine CGA→TGA
[0092] Tryptophan TGG→TGA
   [0093] TGG→TAG
   [0094] TGG→TAA

[0095] By “codon optimization” is meant a process of modifying a nucleic acid sequence for enhanced expression in the host cells of interest by replacing at least one codon (e.g. about or more than about 1, 2, 3, 4, 5, 10, 15, 20, 25, 50, or more codons) of the native sequence with codons that are more frequently or most frequently used in the genes of that host cell while maintaining the native amino acid sequence. Various species exhibit particular bias for certain codons of a particular amino acid. Codon bias (differences in codon usage between organisms) often correlates with the efficiency of translation of messenger RNA (mRNA), which is in turn believed to be dependent on, among other things, the properties of the codons being translated and the availability of particular transfer RNA (tRNA) molecules. The predominance of selected tRNAs in a cell is generally a reflection of the codons used most frequently in peptide synthesis. Accordingly, genes can be tailored for optimal gene expression in a given organism based on codon optimization. Codon usage tables are readily available, for example, at the “Codon Usage Database” available at www.kazusa.orjp/codon/(visited Jul. 9, 2002), and these tables can be adapted in a number of ways. See, Nakamura, Y., et al. “Codon usage tabulated from the international DNA sequence databases: status for the year 2000” Nucl. Acids Res. 28:292 (2000). Computer algorithms for codon optimizing a particular sequence for expression in a particular host cell are also available, such as Gene Forge (Aptagen; Jacobus, Pa.), are also available. In some embodiments, one or more codons (e.g. 1, 2, 3, 4, 5, 10, 15, 20, 25, 50, or more, or all codons) in a sequence encoding an engineered nuclease correspond to the most frequently used codon for a particular amino acid.

[0096] By “complex” is meant a combination of two or more molecules whose interaction relies on inter-molecular forces. Non-limiting examples of inter-molecular forces include covalent and non-covalent interactions. Non-limiting examples of non-covalent interactions include hydrogen bonding, ionic bonding, halogen bonding, hydrophobic bonding, van der Waals interactions (e.g., dipole-dipole interactions, dipole-induced dipole interactions, and London dispersion forces), and π-effects. In an embodiment, a complex comprises polypeptides, polynucleotides, or a combination of one or more polypeptides and one or more polynucleotides. In one embodiment, a complex comprises one or more polypeptides that associate to form a base editor (e.g., base editor comprising a nucleic acid programmable DNA binding protein, such as Cas9, and a deaminase) and a polynucleotide (e.g., a guide RNA). In an embodiment, the complex is held together by hydrogen bonds. It should be appreciated that one or more components of a base editor (e.g., a deaminase, or a nucleic acid programmable DNA binding protein) may associate covalently or non covalently. As one example, a base editor may include a deaminase covalently linked to a nucleic acid programmable DNA binding protein (e.g., by a peptide bond). Alternatively, a base editor may include a deaminase and a nucleic acid programmable DNA binding protein that associate noncovalently (e.g., where one or more components of the base editor are supplied in trans and associate directly or via another molecule such as a protein or nucleic acid). In an embodiment, one or more components of the complex are held together by hydrogen bonds.

[0097] By “cytosine” or “4-Aminopyrimidin-2(1H)-one” is meant a purine nucleobase with the molecular formula C₄H₅N₃O, having the structure

[chemical structure]

and corresponding to CAS No. 71-30-7.

[0098] By “cytidine” is meant a cytosine molecule attached to a ribose sugar via a glycosidic bond, having the structure

[chemical structure]

and corresponding to CAS No. 65-46-3.
Its molecular formula is C₉H₁₃N₃O₅.

[0099] By “Cytidine Base Editor (CBE)” is meant a base editor comprising a cytidine deaminase.

[0100] By “Cytidine Base Editor (CBE) polynucleotide” is meant a polynucleotide comprising a CBE.

[0101] By “cytidine deaminase” or “cytosine deaminase” is meant a polypeptide or fragment thereof capable of deaminating cytidine or cytosine. In one embodiment, the cytidine deaminase converts cytosine to uracil or 5-methylcytosine to thymine. The terms “cytidine deaminase” and “cytosine deaminase” are used interchangeably throughout the application. Petromyzon marinus cytosine deaminase 1 (PmCDA1) (SEQ ID NO: 13-14), Activation-induced cytidine deaminase (AICDA) (SEQ ID NOs: 15-21), and APOBEC (SEQ ID NOs: 12-61) are exemplary cytidine deaminases. Further exemplary cytidine deaminase (CDA) sequences are provided in the Sequence Listing as SEQ ID NOs: 62-66 and SEQ ID NOs: 67-189.

[0102] By “cytosine” is meant a pyrimidine nucleobase with the molecular formula C4H5N3O.

[0103] By “cytosine deaminase activity” is meant catalyzing the deamination of cytosine or cytidine. In one embodiment, a polypeptide having cytosine deaminase activity converts an amino group to a carbonyl group. In an embodiment, a cytosine deaminase converts cytosine to uracil (i.e., C to U) or 5-methylcytosine to thymine (i.e., 5 mC to T). In some embodiments, a cytosine deaminase as provided herein has increased cytosine deaminase activity (e.g., at least 10-fold, 20-fold, 30-fold, 40-fold, 50-fold, 60-fold, 70-fold, 80-fold, 90-fold, 100-fold or more) relative to a reference cytosine deaminase.

[0104] The term “deaminase” or “deaminase domain,” as used herein, refers to a protein or fragment thereof that catalyzes a deamination reaction. Exemplary deaminases include cytidine and adenosine deaminases.

[0105] “Detect” refers to identifying the presence, absence or amount of the analyte to be detected.

[0106] By “detectable label” is meant a composition that when linked to a molecule of interest renders the latter detectable, via spectroscopic, photochemical, biochemical, immunochemical, or chemical means. For example, useful labels include radioactive isotopes, magnetic beads, metallic beads, colloidal particles, fluorescent dyes, electron-dense reagents, enzymes (for example, as commonly used in an enzyme-linked immunosorbent assay (ELISA)), biotin, digoxigenin, or haptens.

[0107] By “disease” is meant any condition or disorder that damages or interferes with the normal function of a cell, tissue, or organ. An example of a disease includes Glycogen Storage Disease Type 1 (also known as GSD1 or Von Gierke Disease). In some embodiments, the GSD1 is Type 1a (GSD1a).

[0108] The term “effective amount,” as used herein, refers to an amount of a biologically active agent that is sufficient to elicit a desired biological response. In some embodiments, an effect amount is an amount required to ameliorate the symptoms of a disease relative to an untreated patient. The effective amount of an active agent(s) used to practice therapeutic methods and treatment of a disease varies depending upon the manner of administration, the age, body weight, and general health of the subject. Ultimately, the attending physician or veterinarian will decide the appropriate amount and dosage regimen. Such amount is referred to as an “effective” amount. In one embodiment, an effective amount is the amount of a base editor described herein (e.g., a fusion protein comprising a programmable DNA binding protein, a nucleobase editor and gRNA) sufficient to introduce an alteration in a gene of interest (e.g., G6PC) in a cell (e.g., a cell in vitro, in vivo, or ex vivo). In one embodiment, an effective amount is the amount of a base editor required to achieve a therapeutic effect (e.g., to reduce or control GSD1a or a symptom or condition thereof). Such therapeutic effect need not be sufficient to alter G6PC in all cells of a subject, tissue or organ, but only to alter G6PC in about 1%, 5%, 10%, 25%, 50%, 75% or more of the cells present in a subject, tissue or organ. In one embodiment, an effective amount is sufficient to ameliorate one or more symptoms of GSD1a.

[0109] In some embodiments, an effective amount of a fusion protein provided herein, e.g., of a nucleobase editor comprising a nCas9 domain and a deaminase domain (e.g., adenosine deaminase) refers to the amount of the fusion protein that is sufficient to induce editing of a target site specifically bound and edited by the nucleobase editors described herein. As will be appreciated by the skilled artisan, the effective amount of an agent, e.g., a fusion protein, a nuclease, a hybrid protein, a protein dimer, a complex of a protein (or protein dimer) and a polynucleotide, or a polynucleotide, may vary depending on various factors as, for example, on the desired biological response, e.g., on the specific allele, genome, or target site to be edited, on the cell or tissue being targeted, and/or on the agent being used.

[0110] By “fragment” is meant a portion of a polypeptide or nucleic acid molecule. This portion contains, at least about 10%, 20%, 30%, 40%, 50%, 60%, 70%, 80%, or 90% of the entire length of the reference nucleic acid molecule or polypeptide. A fragment may contain 10, 20, 30, 40, 50, 60, 70, 80, 90, or 100, 200, 300, 400, 500, 600, 700, 800, 900, or 1000 nucleotides or amino acids.

[0111] By “glucose-6-phosphatase (G6PC) polypeptide” is meant a polypeptide or fragment thereof having at least about 95% amino acid sequence identity to NCBI Accession No. AAA16222.1. A wild-type G6PC polypeptide is capable of catalyzing the hydrolysis of D-glucose 6-phosphate to D-glucose and orthophosphate, while a G6PC polypeptide comprising a deleterious mutation lacks or has reduced catalytic activity. In particular embodiments, a method of editing a G6PC polynucleotide is provided, in which the method comprises a single nucleotide polymorphism (SNP) associated with Glycogen Storage Disease Type 1a (GSD1a). In one embodiment, the A·T to G·C alteration at the SNP associated with GSD1a changes a glutamine (Q) to a non-glutamine (X) amino acid in the G6PC polypeptide. In another embodiment, the A·T to G·C alteration at the SNP associated with GSD1a changes an arginine (R) to a non-arginine (X) in the G6PC polypeptide. In one embodiment, the SNP associated with GSD1a results in expression of an G6PC polypeptide having a non-glutamine (X) amino acid at position 347 or a non-arginine (X) amino acid at position 83. In one embodiment, the base editor correction replaces the glutamine at position 347 with a non-glutamine amino acid (X). In another embodiment, the base editor correction replaces the arginine at position 83 with a non-arginine amino acid (X). Mutations associated with GSD1a are known in the art and described, for example, in Chou et al., Hum. Mutat. 29:921-930, 2008, which is incorporated herein by reference. Methods for detecting glucose-6-phosphatase activity are known in the art and described, for example by Varga et al., Int. J.

[0112] Mol. Sci. 2019, 20, 5039, which is incorporated herein by reference.

[0113] In particular embodiments, G6PC comprises one or more alterations relative to the following reference sequence. In particular embodiments, G6PC associated with GSD1a comprises one or more mutations selected from Q347X and R83C. An exemplary G6PC amino acid sequence from Homo Sapiens is provided below:

| (SEQ ID NO: 379) | |
|---|---|
| 1 | MEEGMNVLHD FGIQSTHYLQ VNYQDSQDWF ILVSVIADLR NAFYVLFPIW FHLQEAVGIK |
| 61 | LLWVAVIGDW LNLVFKWILF GQRPYWWVLD TDYYSNTSVP LIKQFPVTCE TGPGSPSGHA |
| 121 | MGTAGVYYVM VTSTLSIFQG KIKPTYRFRC LNVILWLGFW AVQLNVCLSR IYLAAHFPHQ |
| 181 | VVAGVLSGIA VAETFSHIHS IYNASLKKYF LITFFLFSFA IGFYLLLKGL GVDLLWTLEK |
| 241 | AQRWCEQPEW VHIDTTPFAS LLKNLGTLFG LGLALNSSMY RESCKGKLSK WLPFRLSSIV |
| 301 | ASLVLLHVFD SLKPPSQVEL VFYVLSFCKS AVVPLASVSV IPYCLAQVLG QPHKKSL |

[0114] By “glucose-6-phosphatase (G6PC) polynucleotide” is meant a nucleic acid molecule encoding an G6PC polypeptide, as well as the introns, exons, and regulatory sequences associated with its expression, or fragments thereof. In embodiments, an G6PC polynucleotide is the genomic sequence, mRNA, or gene associated with and/or required for G6PC expression. An exemplary G6PC nucleotide sequence from Homo Sapiens is provided below (GenBank: U01120.1):

| (SEQ ID NO: 380) | |
|---|---|
| 1 | ATAGCAGAGC AATCACCACC AAGCCTGGAA TAACTGCAAG GGCTCTGCTG ACATCTTCCT |
| 61 | GAGGTGCCAA GGAAATGAGG ATGGAGGAAG GAATGAATGT TCTCCATGAC TTTGGGATCC |
| 121 | AGTCAACACA TTACCTCCAG GTGAATTACC AAGACTCCCA GGACTGGTTC ATCTTGGTGT |
| 181 | CCGTGATCGC AGACCTCAGG AATGCCTTCT ACGTCCTCTT CCCCATCTGG TTCCATCTTC |
| 241 | AGGAAGCTGT GGGCATTAAA CTCCTTTGGG TAGCTGTGAT TGGAGACTGG CTCAACCTCG |
| 301 | TCTTTAAGTG GTAAGAACCA TATAGAGAGG AGATCAGCAA GAAAAGAGGC TGGCATTCGC |
| 361 | TCTCGCAATG TCTGTCCATC AGAAGTTGCT TTCCCCAGGC TATTCAGGAA GCCACGGGCT |
| 421 | ACTCATGCTT CCAACCCCTC TCTCTGACTT TGGATCATCT ACATAAAGGG GGAAGACAGA |
| 481 | AAAAATCCTA CCAGTGAGTT GAAAATACAG GAAAGCCTAT TTCATATGGG TTAAAGGGTA |
| 541 | GGACAGTTGA ATTTCGTGAA AAGTCTGAGT TATATAGGCT TTGAGCAAAG AGTTTTATTA |
| 601 | GTATGAAGCA GAAGAGGTAA CATAAAGAAA GATGTATGGG GCCAGGCATG GTGGCTCACA |
| 661 | CCTGTAATCC CAGCACTTTG GGAGGCCGAG GTGGGCGAAT CACTCCTGGG TGAACTCAGG |
| 721 | AGTTCAAGAC CAGCCTGGGC AACATGGCGA AACTCCATCT CTACAAAAAC ATTACGAAAA |
| 781 | TTAGCTGGGC GTGTTGGTGC TGTAGTCCCA GCTACTCAGG AGGCTGAGGT GAGAGGCGGA |
| 841 | GGAGGTTGCA GTGAGTCAAG ATCATGCCAC TGCACTCCAG CCTGGGCAAC AGAGTAAGAC |
| 901 | CCTGTCTCAA AAAAAAAAAA AAGATAGATG ATGTATGCTG TATGAAAAAA GGAAACACAC |
| 961 | AGATGATTCA ACAGCCTGTT TTGTGGGGTA ATGAAAAGTC ACCCTGGGAA CTGGGCTCCA |
| 1021 | GCCCTCGTTC TGCCACCCAC CAACTACATG TCCTTGGCAA GTCATATCAA TTATCTGAGT |
| 1081 | TTCTGTTTTA TAATCTACAA ATAGGTTATC TCTGGCAGCT TAATAATAAT CAGGGTTAAC |
| 1141 | ATTTATTAAA CAGTGTGTGC CAGTCCATGT GCTATGTGCT TTTCTGTGAG GTAGTTACTG |
| 1201 | CTATTTACAG AAACAGTAGA TGCAGAGACC AAGGTGCTGA GTTAAATGAT TAGGCCAACA |
| 1261 | AGGTTAGTAC ATGCCGAGCC AGGATGGAAG CCCAGGTAGG CAGGCTGGCT TCCGCGGCAA |
| 1321 | TGCTCTTATG AACTATGTTA CGTCCAGTGC TGATAAACTG ACTCTCTGGG GAGCAGGGGA |
| 1381 | AAGCCCTGAG TTTAGCATTT GCCAATTTCT ATCACGTAAA CATTCCCATT CTGGCCACTT |
| 1441 | TCTTTCTTTC TTTCTTTTGT TTGTTTGTTT GAGATGGAGT CTCGCACTGT TGCCTGGCTG |
| 1501 | GAGTGCAATG GTGCAATCTC AGCTCACTGC AACCTCTGCC TCTCCGGTTC AAGTGATTCT |
| 1561 | CCTGCCTCAG CCTCCCAAGT AGCTGGGATT ACAGGTGCCC GCCACCATGC CCAGCTAATT |
| 1621 | TTTTTTGTAT TTTTAGTAGA GACATGGTTT CACTATGTTG ACTAGGCTGG TCTCGAACTC |
| 1681 | CTGACCTCAT GATCTGCCTG CCTTGGCCTC CCTAAGTGCT AGGATTACAG GCGTGAGCCA |
| 1741 | CTACACCCAG CCGCATGATT CTAAAAAATA AAAAGATGAA GTGTTATTCC AAACATCTGA |
| 1801 | TCTCCATTGA AGAACCATGC AATCTCTCTG GGTTGATAGA GGCCAGAGTT AGTGGCTCTC |
| 1861 | CCTGATTTCG GTGAGAAATC ACTATTCCAC CATCACGGGA TAAAAGGCAT CCTGACTGGC |
| 1921 | GGTTGACACC TATTTCCACA GTGAAAGATA TATCTAGTAC TTTTAAAGGG GAAGTGGTTT |
| 1981 | GTCTGAGATA CTCTGTTTCA AAGTAGAGAG GATACAGAAC AAGCATCTGA AGCTATATAC |
| 2041 | ATCCTTACAG AGAGCAATTC TGATGGAAAT GCAGGCCATG TTTCCCTGGG GGGGGCTCGT |
| 2101 | CCTAGGGGCT GGAGTGCATT CTCTGATGTC AGAGGAAATG CAAGATTCCC TGAGGCCTGA |
| 2161 | GGGAACCCAT GGTATATGCA AGTCCAAGTT TCAAACTGTA GTTCCATATG CATTCTTCCA |
| 2221 | GGACAAATAC TTCTTGAGGT TAAAAAAAAA AAGTCACATA GCTGCCATTT TATGGATTTC |
| 2281 | AGGATTTTTT TTTTTTTTTT TTTGAGATGG AGTCTTGCTC TGTCACCCAG CCTGTAGTGC |
| 2341 | AGTGGCATAA TCTCGGCTCA CGGCAACCTC CGCCTCCCAG GTTCAAGCGA TTCTCTTGCC |
| 2401 | TTAGCCTCCC GAGTAGCTGG GATTACAGTC ACGCACCACC ACATCTGGCT AATTCTTTAT |
| 2461 | ATTTTTTGGT AGAAACGGTG TTTCACCATG TTGGCCAGGC TGGTCTCAAA CTCCTGACCT |
| 2521 | CATGTGATCT GCCTGCCTTG GCCTCCCAAA GTGCTGAGAT TACAGGTGTG AGCCACCGCG |
| 2581 | CCTGCCTGGA GTTCAGAATC TTGGGCTTCA TTATTTGTGT TTAAATAGAT CATACAGTCA |
| 2641 | GGCACGGTGG CTCATGCCTG TAATCCCAGC ACTTTGGGAG GCTGAGGTGG GAGGATTGCC |
| 2701 | TGAGTTCAGG AGATGGAGAC CAGCCTGGGC AACATGGTGA AACCCCGTCT CTACTAAAAA |
| 2761 | TACAAAAACT AGCTGGATGT GGTGGCACAC ACCTGTAGTC CCAGCTATTC AGGAGGCTGA |
| 2821 | GGTGGGAGGA TCCCAGGAGG TAGAGGTCAC AATGAGCCGA GATTGCGCCA CTGCACTCCA |
| 2881 | GGCTGGGTTA CTGAGCCAGA TCCTGTCTCA AAAAAAAAAA AGATAATACA TTCAAACAGT |
| 2941 | TCAAAATGCA AAAGTTACAT ACATAAGGAA GTGTCATGAA ATATCTCCCT CTCACACTTC |
| 3001 | TCCCCAGCCA CCCAGTTCTC CCTTCTAGAG GCAACATGTG AAATCCTTCT CAGGCTACAC |
| 3061 | TCTTCTTGAA GGTGTAGGCT TTGGGCAAAA GCATTCATTC AGTAACCCCA GAAACTTGTT |
| 3121 | CTGTTTTTCC ATAGGATTCT CTTTGGACAG CGTCCATACT GGTGGGTTTT GGATACTGAC |
| 3181 | TACTACAGCA ACACTTCCGT GCCCCTGATA AAGCAGTTCC CTGTAACCTG TGAGACTGGA |
| 3241 | CCAGGTAAGC GTCCCAGCCC CTGCAGACAG AAGCTGAGTG GACCTCGTTT ACCTGTTATG |
| 3301 | GATGAAACTG ACCTTGAGGG GACATGAGGA GAGCCATTCC TTTGTACTTT TGTCATGCTC |
| 3361 | TTCAATTGGC ACAAATTAAT TCACTTCTGC AATACTTTCC TGAATAGCAC AGTAGTATTG |
| 3421 | GAAATCTGCC TATTACAGAA CCTGGATGGA GTCCAGAGAG GCACGGGCAT CCATGGGCAA |
| 3481 | AGGGCTCGTG AGAGTCACCG CCCTGCAGCG CTGTGTCCTG AGAAAGGAGG GGGCAGAAGC |
| 3541 | CTGAGCTTCT GGGGGTCCTT CCCAATGGCC TGGCCCACTG GATGTGCCCT CCTGAGCTGA |
| 3601 | CCGTCCAATC CCTTGCCCTC TCTGTGCCTA CGTTTTATTA GTTACAGCCA GATGGTTACT |
| 3661 | GTCAAATCAA ATGATAGATT TCATTTTCAG TATGTAATAG GAAGCCCCTC CCTCACCCTA |
| 3721 | AAGTCTCAGC TGCCCTCTAA GACTAGTACT CTCTAAGGTA CTAGTATCCC TTCCTCAGAG |
| 3781 | ACCCTTTCCC TGACCCCAAA ACTAGGGAAG GTCCCTTAGT TATTTGCTCT CACAGACCAC |
| 3841 | GCATTTACCT CAGAGCATAT TCACTCATTC AGCTGTTACT TACCAAGCAC CTACTGGGAG |
| 3901 | CTATACACTG TTCTATGTGC TAGGGATACC TCTGTCAGTG AACAACACAG ACACAAAGAT |
| 3961 | CCCTGCCCTT GTGGAGCTGA AATCTGAATA GAGGAGGTGA AATATACAAA AATTATAATA |
| 4021 | AATAAGTAAA CTAGGCCAGT TGTGGTTGCT CATGCCTGTA ATCCCAGCAC TTTGGGAAGC |
| 4081 | CAAGGTAGGT AGATCACCTG AGGTCAGGAG TTCAAAACCA GCCTGGCCAA CATTGCAAAA |
| 4141 | TCCTGTCTTT ACTAAAAATG GAAAAATTGG TCAGGCGTGA TGGCACACGC CTGTAGTCTC |
| 4201 | AGCTACCTGG GAGGCTGAGG CAGGAGAATC GCTTGAACCT GGGAGGCAGA GGTTGCAGTG |
| 4261 | AACCGAGATC GGACCACTGC ACTCCAGCCT GAATGACAGA ACGAGACTCT GTCTCAAAAA |
| 4321 | AAAAGTAAAC TATTAATATG TAGGATAGGC CAGGCACGGT GGCTCACCCT GTAATCCCAG |
| 4381 | CACTTTGGGA GGCTGAGGCG GGTGGATCAC CTGAGGTGAG GAGTTCAAGA CCAGCCTGGC |
| 4441 | CAACATGGCA AAACCCTGTC TCTACTAAAA ATACAAAAAT TAGCTGGGTG TCCTGGTGCA |
| 4501 | TGCCTGTAAT CTGAGCTACT CAGGAGGCTA AGGCAGGAGA ATCGCTTGAA CCTGGGAGGT |
| 4561 | GGTGAGCCAA GATTGCGCCA TTGCACTCCA GCCTGGGCGA CAAAATGAGA CACCATCTGA |
| 4621 | AAAAAAAAAA AAAATATATA TATATATACA CACACACACA CACACACACA CACACACACA |
| 4681 | TATAATACTA GAAAATGATT GTTTATAGGC AAAAAAAAAA AAAAAGAAGA AGAAGAAGAA |
| 4741 | AAGGAAAGGA GAAGGAAAGA AGGACCAAAC ATCTTTTGTA GAAATATGTT TGCTTTCATC |
| 4801 | ATAACAGCTT GTTATCAAGG ATGAATTTCT CCCTGAAATT AATGGAGGCA CAGACTGGAA |
| 4861 | AGTTTAAAGT GGCTTTAAGA GGTTATTTTA TTTAGTCCTC TGTCTTAATA GAAGCAAATT |
| 4921 | ATTATCTCTG CTCCTTAGGT AGAGTAGCTA AGGCTCAGAA AGTAGGCCGG GCGCGGTGGC |
| 4981 | TCACGCCTGT AATCCTAGCA CTTTGGGAGG CCAACGCAGG TGGATCACCT GAGGTCAGGA |
| 5041 | GTTTGAGACC AGCCTGGCCA ACATGGTGAA ACCTCGTCAC TAATAAAAAA ATACAAAAAC |
| 5101 | TTAGCCAGGC ATGGTGGCGG GCGCCTGTAA TCCCAGCTAC CCAGGAGGCT GCGGCAGGAG |
| 5161 | AATCACTTCA ACCCGGGAGG CAGAGGTTGC AGTGAGCTGA AATCACACCA CTGCACTCCA |
| 5221 | GCCTTGGTGA CAGAGAAAGA TTCTGTCAGG AAAAAAAAAA AAAAGTTTAA ATGAATTACC |
| 5281 | CAAGGTATAT AATTGTTAGT GTTAGAAGGA AGAAGAAGGG AGGGAGGAAG GAAGGGAGAA |
| 5341 | AGAAAGGGAA GGAGGAAGGG AGGGAGGGAA GAAAGCCTTT ATTTATCTAT GGGGTTCCCT |
| 5401 | GGAAAGCAGG CTGAAATGGA GATTCACGTG CAGGAGTTTA GATACTCTGG GGAACTATAC |
| 5461 | TTGTAGAAGG GAAGGAACAG GAACAGGGCA GAAGGAGAGG TCCGGTTGTG ATTCTGCCTC |
| 5521 | ATCCAACCCC ACAGCGAGCT CTGAAGCTGG GGATGGCTCC TCAGAGTTGG TCCAAGTTGG |
| 5581 | GACAAGGGAA TCAGACCCTG GGGAGAGCGT AACCTTGATC AAGGCGACTC TCTTTAGCCC |
| 5641 | AGGGCAATGC CAGGAGAAGG CTGAGAGCAG AAAGCCATCT ACCATCACAC TCTCAACAGC |
| 5701 | TACGAAATAA GTCCTGCAGT TCAGGAGGGA GGTCTGGGCG GCACATCTCA GGACCCTCTA |
| 5761 | TCTCTCAGGG TAGAGGAATT AAGAATGGGA TGGGAACCAG ACGGGCCATG GTGGCTCACA |
| 5821 | CCTATAATCC CAACACTTTG GGAGGCCAAG GGTAGGAGGA TTGCTTGAGC CCAAGAGTTC |
| 5881 | AAAACCAGCC TGGGCAAAAA CAATCAAACA AACAAACAAA ACACATTTAA AAAATTTGCT |
| 5941 | GTGTGTGGTG GTGTGCACCT GTGGTCCCAG CTACTCAGGG GGCTGAGGTG GGAGGATTGC |
| 6001 | TTGAGTCCAG GAGGTCGAGG CTGCAGTGAG CTATGATCAT GGCACTGCAT TGCAGCCTAG |
| 6061 | GAGACAAAGC AAGACACTGT CTCTAAAAAA ACAAAAAACA AACAAATAAA AAAACGGAAC |
| 6121 | CGGTTGCAAG CAGGGTTAAA TAGCGTGGTC AGAGTAGGAC TCACTGAGAA TATGAGATCT |
| 6181 | GAGTCAAGTC TTCAAGGATG TGAGGAAGTA AGTTTCTGGC AGAAGAGCTG TGAAGGGCTG |
| 6241 | TCTGGCCAGA GAAGATTGCA ATGCAAAAGC CCTGAGGTGG GAACGTGTTT GGTGTGTTTA |
| 6301 | AAGGAAAGCA ATGAGGCCAG TGTAGCCAGA ACAGAGTGTG CAAGGAGAGA AGGAACAGAA |
| 6361 | GATGTGGAGG GCAGATCAGT TTGTAATTGT ACGCCCAGTA TGCTGATTCT TTGTGTAATC |
| 6421 | TCCAGACTGT ATTAAACTGC AAGAGCAGGG CCCCTCTCTG GCTTTGCTCA TCATTGTATT |
| 6481 | CCCAGAGCCT TGCACAATGC TTGGTGCATA GGAGATGGAA ATTTGTTAAA TAAATGAATT |
| 6541 | ATGGATAACG AATGGATGGT AAGATGGGTG GATGGATGGG GGGTGAACGG ATGGATGGGG |
| 6601 | GGTGAATGGA TGGATGAATG GGTAGATGGG TGGATAGGGG GATGGCTGGG TGGCTGGGTA |
| 6661 | GATGATGCAC TGTCTCCCAG ATGAGGACCT TTTCACCTTT ACTCCATTCT CTTTCCTGCC |
| 6721 | CTTTAGGGAG CCCCTCTGGC CATGCCATGG GCACAGCAGG TGTATACTAC GTGATGGTCA |
| 6781 | CATCTACTCT TTCCATCTTT CAGGGAAAGA TAAAGCCGAC CTACAGATTT CGGTAAGAAC |
| 6841 | TCACCACTGG GGTGTAGGTG GTGGAGGGCA GGAGGCAGCT CTCTCTGTAG CTGACACACC |
| 6901 | ACGTATTCTT CCTCACATCC CCCTAGCCCG CTCCCACACC TGGGCAGCCG CTGATTAAGA |
| 6961 | GTTGTGGCAC TTTGGATAGG GATAAACCTC AGAGTCAGGG AATGTTTGGG CTGAAAGGGA |
| 7021 | TCCAGTAGTG CAATCCGTTG TTTTACAGAT AAGGAAACAA AGCCCAACAC CATGAAGGGA |
| 7081 | CTTATAAAAA TAAGGTAGTG AAGTAGCAGC AGGGCTTAAA TAAAAACCCA TGTCTGTACC |
| 7141 | AACCACAGAG TCACCCATCC AGGTTAAAAT AACCAGAGAA ACAGAAGATA TTCCTACTAC |
| 7201 | AGAGAATTCC GGGTGTGCAG CCACAGTGCA AATCCTTTTT ATTTTTATTT TTGAGATGCA |
| 7261 | GTCTCGCTCT GTCATCCAGG CTGAAGTGCA GTGGCACGAT CATGTCTCGC TGCAACCTCT |
| 7321 | GCCTCCCAGG CTCAAGCGAT CCTCCCACCT CAGCCATCTG AGTAGCTGGG ACCACAGGCC |
| 7381 | ACACACCACA CCCAGCTAAT TTCTCGTATC TTTTTGTAGA GACAGAGTTC TGCTATGTTG |
| 7441 | CCCAGGCTCA GGCTGGTCTT GATCTCAAGC AATTGGCTTG CCTCAGCCTC CTAAAATATT |
| 7501 | GGGATTACAG GCATGAGCCA CCGCGCCAGC CATGCAAATC CTTAATTATC AAACAGATAA |
| 7561 | AATAGGGAAG TTAAAATTCA TATACACAAG GGTTAACCAC TTGCCACAGG CATTTTTTTT |
| 7621 | TTTTTTTTGA GACGGAATCT CGCTCTGTTG CCCAGGCTGG AGTGCAGTGG CGCCATCTCG |
| 7681 | CCTCACTGCA ACCTCCGCTT CCTGGGTTCA AGCTATTCTT CTGCCTCAGC CTACCGAGTA |
| 7741 | GCTGGGACTA CAGGCACGTG CCACCACACC TGGCTAATTT TTTTATTTTT AGTAGAGATG |
| 7801 | GGGTTTCACC ATATTGGCCA GGCTGGTCTT GAACTCCTGA CCTAGTGATC CATCCGCCTC |
| 7861 | AGCCTCCCAA AGTGCTGGGA TTGCAGGCAT GAGCCACCGC GCCTGGCCTT TTTTTTTTTT |
| 7921 | TTTTGAGACG GAGTTTTGCT CTTGTTGCCC AGGCTAGAGT GCAGTGGCGC AGTCTCGGCT |
| 7981 | CACTGTAACC TCCACCTCCT GAGTTCAAGC AATTCTCCTG CCTCAGCCTC TCAAATAGCT |
| 8041 | GGGATTACAG GCGTGAGCCA CCCCACCTGG CTAATTTTGT AATTTTTTTT TTAGTAGAGA |
| 8101 | TGGGGTTTCA CCTGTTGATC AGGCTGGTCT CAAACTCCTG ACCTCAAGTG ATCCACCCAC |
| 8161 | CTCGGCCTCC CAAAGTGCTG GGATTACAAG CATAAGCCAC CGTGCCTGGT CAATTTTGAT |
| 8221 | CTTTTTTAAA GAGACAGGGG TCTTGCTATG TTGCCCAGAC TAGTCTTGAA CTCCTGGCCT |
| 8281 | CAAGTGATCC TCTCACCTCG GCCTCCCAAA GTATTGGGAT TACAGGTCTG AGCCGCTGCA |
| 8341 | CCCAGCCCCC AACAGGCATC TTTGGACTTT TGAGTACTGG CTTTAATTTA CAAAAATTCC |
| 8401 | ACTGAGAGCA CCTAAGTTTG CCAGGCTCCA ACATTTCTGC AGGGGCTGTT TTCTTTGCTG |
| 8461 | AAGGATCTGC ACCTGTGTTC TGTTATGGTT GCCTCTTCTG TTGCAGGTGC TTGAATGTCA |
| 8521 | TTTTGTGGTT GGGATTCTGG GCTGTGCAGC TGAATGTCTG TCTGTCACGA ATCTACCTTG |
| 8581 | CTGCTCATTT TCCTCATCAA GTTGTTGCTG GAGTCCTGTC AGGTATGGGC TGATCTGACT |
| 8641 | CCCTTCCTTC TCCCCCAAAC CCCATTCCGT TTCTCTCCCT AATCAGGACA AAATCCCAGC |
| 8701 | ATTCCAGCCA CATCCTGTGT GTAATCAGTA CTGTTAGCAT TTCTGTGGGT TGAAAGTCAA |
| 8761 | GAATGAGCAA CTTGAAATGA TTAATTTCTA TAAGAGTGCC CAGATCTATA GAATGAATTG |
| 8821 | TGTAGAAGTT ACCATACATC AAATTAACGC ACCAAATTGA ATTAGCTTGA AATCTCAGAG |
| 8881 | CTTTTTACAA TCTTTATTTC TTACTGGTCT TCAACAGGCC CTAATTTACT TTTCAGGGAA |
| 8941 | TCTGCCAAAT TTAACAAATT AACACGATGT CCTAGGAAAG CTGTTCATTT AAATACATTC |
| 9001 | ATTTGCAAAC CTAATAGATA ACTGCAGTTG ATCTCTTTTA TAGGTTCAGA GTTTTGAATA |
| 9061 | TGTTTTTTTT TGTTTTTTTT TTTTGAGATG GAGTCTCGCT CTGTGACCCA GGCTAGAGTG |
| 9121 | CAGTGGTGCG ATCTCGGCTC ACTGCAAGCT CCACCTCCTG GGTTCACGCC ATTCTCCTGC |
| 9181 | CTCAGCCTCT CCGAGTAGCT GGGACTACAG GCGCCCGCCA CCATGCCCGG CTAATTTTTT |
| 9241 | GTATTTTTAG CAGAGACGGG GTTTCACCGT GGTCTTGATC TCCTGACCTC GTGATCCGCC |
| 9301 | CGCCTCGGCC TCCCAAAGCG CTGGGATTAC AAGGGTGAGC CACCGCACCC TGCCTGAATA |
| 9361 | TGTGTTTTCT TAGATCCAAT TAACAAGGGT AAGACAAGAT TTAAGTTAAG CATAAGAAAG |
| 9421 | ATTTTGTGGG AGGCACTGGA ATATAAGACC TTAACAAAAC TGTGGAATTT CTCCCCTGGA |
| 9481 | GATTTGTAAG AACGGAACAT AGCAGCATTC AAAGAAGAAT GTTGAGAACA AGGGAGATAA |
| 9541 | TGGTTTCATG GTAATCACAA AAGTAACACA GCATTTAGTA CTGGGTTCCA TGTTTGAGGA |
| 9601 | AGAACCTGGA AGCCATATCA CATGAAAAAC CTGGGAATGT TTAGGTTAGA GAGAATAACT |
| 9661 | GTGTTCAAAT GTGTGACAGA GGGACTAGAT TCATCACTTA CTAACTCCTG CAGAAAGAAC |
| 9721 | TGAGAAAAAT AGACAGTATT AGAGGGGGAC CAGTTTCACA CAGACAAGGA AGAACTATTC |
| 9781 | AGCAATCAAT TCCGTTCAAA GATAAAATGG ACTGTTATAG TGGGGGTGAG CTCCCTACCT |
| 9841 | CTGAGGGTAT TTCAAGTAGA GATAGGAGGA CCTCCTGGTA GGAAATTTGC ATACGGTGGG |
| 9901 | AGATTGTACG TGATATGGCA CCTCCATCTG AAAGAGTCTA TATTGAGGGC AGGCTGGAGT |
| 9961 | CACACATGGG AATAAGCCAG GCGACCCTCC CATCTGCCAT CTGTGATTTA ATTCCACAGT |
| 10021 | CGCAGAACGG ATGGCATGTC ACCCACTCCT CCAAACCCAC CTCTAGCAAA GGTCCCAAAT |
| 10081 | CCTTCCTATC TCTCACAGTC ATGCTTTCTT CCACTCAGGC ATTGCTGTTA CAGAAACTTT |
| 10141 | CAGCCACATC CACAGCATCT ATAATGCCAG CCTCAAGAAA TATTTTCTCA TTACCTTCTT |
| 10201 | CCTGTTCAGC TTCGCCATCG GATTTTATCT GCTGCTCAAG GGACTGGGTG TAGACCTCCT |
| 10261 | GTGGACTCTG GAGAAAGCCC AGAGGTGGTG CGAGCAGCCA GAATGGGTCC ACATTGACAC |
| 10321 | CACACCCTTT GCCAGCCTCC TCAAGAACCT GGGCACGCTC TTTGGCCTGG GGCTGGCTCT |
| 10381 | CAACTCCAGC ATGTACAGGG AGAGCTGCAA GGGGAAACTC AGCAAGTGGC TCCCATTCCG |
| 10441 | CCTCAGCTCT ATTGTAGCCT CCCTCGTCCT CCTGCACGTC TTTGACTCCT TGAAACCCCC |
| 10501 | ATCCCAAGTC GAGCTGGTCT TCTACGTCTT GTCCTTCTGC AAGAGTGCGG TAGTGCCCCT |
| 10561 | GGCATCCGTC AGTGTCATCC CCTACTGCCT CGCCCAGGTC CTGGGCCAGC CGCACAAGAA |
| 10621 | GTCGTTGTAA GAGATGTGGA GTCTTCGGTG TTTAAAGTCA ACAACCATGC CAGGGATTGA |
| 10681 | GGAGGACTAC TATTTGAAGC AATGGGCACT GGTATTTGGA GCAAGTGACA TGCCATCCAT |
| 10741 | TCTGCCGTCG TGGAATTAAA TCACGGATGG CAGATTGGAG GGTCGCCTGG CTTATTCCCA |
| 10801 | TGTGTGACTC CAGCCTGCCC TCAGCACAGA CTCTTTCAGA TGGAGGTGCC ATATCACGTA |
| 10861 | CACCATATGC AAGTTTCCCG CCAGGAGGTC CTCCTCTCTC TACTTGAATA CTCTCACAAG |
| 10921 | TAGGGAGCTC ACTCCCACTG GAACAGCCCA TTTTATCTTT GAATGGTCTT CTGCCAGCCC |
| 10981 | ATTTTGAGGC CAGAGGTGCT GTCAGCTCAG GTGGTCCTCT TTTACAATCC TAATCATATT |
| 11041 | GGGTAATGTT TTTGAAAAGC TAATGAAGCT ATTGAGAAAG ACCTGTTGCT AGAAGTTGGG |
| 11101 | TTGTTCTGGA TTTTCCCCTG AAGACTTACT TATTCTTCCG TCACATATAC AAAAGCAAGA |
| 11161 | CTTCCAGGTA GGGCCAGCTC ACAAGCCCAG GCTGGAGATC CTAACTGAGA ATTTTCTACC |
| 11221 | TGTGTTCATT CTTACCGAGA AAAGGAGAAA GGAGCTCTGA ATCTGATAGG AAAAGAAGGC |
| 11281 | TGCCTAAGGA GGAGTTTTTA GTATGTGGCG TATCATGCAA GTGCTATGCC AAGCCATGTC |
| 11341 | TAAATGGCTT TAATTATATA GTAATGCACT CTCAGTAATG GGGGACCAGC TTAAGTATAA |
| 11401 | TTAATAGATG GTTAGTGGGG TAATTCTGCT TCTAGTATTT TTTTTACTGT GCATACATGT |
| 11461 | TCATCGTATT TCCTTGGATT TCTGAATGGC TGCAGTGACC CAGATATTGC ACTAGGTCAA |
| 11521 | AACATTCAGG TATAGCTGAC ATCTCCTCTA TCACATTACA TCATCCTCCT TATAAGCCCA |
| 11581 | GCTCTGCTTT TTCCAGATTC TTCCACTGGC TCCACATCCA CCCCACTGGA TCTTCAGAAG |
| 11641 | GCTAGAGGGC GACTCTGGTG GTGCTTTTGT ATGTTTCAAT TAGGCTCTGA AATCTTGGGC |
| 11701 | AAAATGACAA GGGGAGGGCC AGGATTCCTC TCTCAGGTCA CTCCAGTGTT ACTTTTAATT |
| 11761 | CCTAGAGGGT AAATATGACT CCTTTCTCTA TCCCAAGCCA ACCAAGAGCA CATTCTTAAA |
| 11821 | GGAAAAGTCA ACATCTTCTC TCTTTTTTTT TTTTTTTGAG ACAGGGTCTC ACTATGTTGC |
| 11881 | CCAGGCTGCT CTTGAATTCC TGGGCTCAAG CAGTCCTCCC ACCCTACCAC AGCGTCCCGC |
| 11941 | GTAGCTGGGA CTACAGGTGC AAGCCACTAT GTCCAGCTAG CCAACTCCTC CTTGCCTGCT |
| 12001 | TTTCTTTTTT TTTCTTTTTT TGAGACGGCG CACCTATCAC CCAGGCTGGA GTGGAGTGGC |
| 12061 | ACGATCTTGG CTCACTGCAA CCTCTTCCTC CTGGTTCAAG CGATTCTCAT GTCTCAGCCT |
| 12121 | CCTCAGTAGC TAGGACTACC GGCGTGCACC ACCATGCCAG GCTAATTTTT ATATTTTTAG |
| 12181 | AATTTTAGAA GAGATGGGAT TTCATCATGT TGGCCAGGCT GGTCTCGAAC TCCTGACCTC |
| 12241 | AAGTGATCCA CCTGCCTTGG CCTCCCAAGG TGCTAGGATT ACAGGCATGA GCCACCGCAC |
| 12301 | CGGGCCCTCC TTGCCTGTTT TTCAATCTCA TCTGATATGC AGAGTATTTC TGCCCCACCC |
| 12361 | ACCTACCCCC CAAAAAAAGC TGAAGCCTAT TTATTTGAAA GTCCTTGTTT TTGCTACTAA |
| 12421 | TTATATAGTA TACCATACAT TATCATTCAA AACAACCATC CTGCTCATAA CATCTTTGAA |
| 12481 | AAGAAAAATA TATATGTGCA GTATTTTATT AAAGCAACAT TTTATTTAAG AATAAAGTCT |
| 12541 | TGTTAATTAC TATATTTTAG ATGCAATGTG ATCTGAAGTT TCTAATTCTG GCCCAACTAA |
| 12601 | ATTTCTAGCT CTGTTTCCCT AAACAAATAA TTTGGTTTCT CTGTGCCTGC ATTTTCCCTT |
| 12661 | TGGAGAAGAA AAGTGCTCTC TCTTGAGTTG ACCGAGAGTC CCATTAGGGA TAGGGAGACT |
| 12721 | TAAATGCATC CACAGGGGCA CAGGCAGAGT TGAGCACATA AACGGAGGCC CAAAATCAGC |
| 12781 | ATAGAACCAG AAAGATTCAG AGTTGGCCAA GAATGAACAT TGGCTACCAG ACCACAAGTC |
| 12841 | AGCATGAGTT GCTCTATGGC ATCAAATTGC AACTTGAGAG TAGATGGGCA GGGTCACTAT |
| 12901 | CAAATTAAGC AATCAGGGCA CACAAGTTGC AGTAACACAA CAAGACTAGG CCAGCTCTGG |
| 12961 | AATCCAGTAA CTCAGTGTCA GCAAGGTTTT GGGTTATAGT TCAAGAAAGT CTAAACAGAG |
| 13021 | CCAGTCACAG CACCAAGGAA TGCTCAAGGG AGCTATTGCA GGTTTCTCTG CTAAGAGATT |
| 13081 | TATTTCATCC TGGGTGCAGG GTTCGACCTC CAAAGGCCTC AAATCATCAC CGTATCAATG |
| 13141 | GATTTCCTGA GGGTAAGCTC CGCTATTTCA CACCTGAACT CCGGAGTCTG TATATTCAGG |
| 13201 | GAAGATTGCA TTCTCCTACT GGATTTGGGC TCTCAGAGGG CGTTGTGGGA ACCAGGCCCC |
| 13261 | TCACAGAATC AAATGGTCCC AACCAGGGAG AAAGAAAATA GTCTTTTTTT TTTTTTTAAT |
| 13321 | AGAGATGGGG GTCTCACTAT GCTGCCCAGG CTGGTCTTGA ACTCCTGGGT TCAAGTGATC |
| 13381 | CTCCTGCCTC AGCCTCCCAA AGTGCTGGGA TTACAGTGTG AGCCACTGCG CTTGGCCAGA |
| 13441 | AATGGTTTTG ATCTGTCTGA ACTGAACCCT ACTGCTTAGG CATAGCCCCA TCCTTGATAA |
| 13501 | TCTATTTGCT CCCAAGGACC AAGTCCAAGA TCCTTACAAG AAAGGTCTGC CAGAAAGTAA |
| 13561 | ATACTGCCCC CACTCCCTGA AGTTTATGAG GTTGATAAGA AAACATAACA GATAAAGTTT |
| 13621 | ATTGAGTGCT AACTTTA. |

[0115] By “guide polynucleotide” is meant a polynucleotide or polynucleotide complex which is specific for a target sequence and can form a complex with a polynucleotide programmable nucleotide binding domain protein (e.g., Cas9 or Cpf1). In an embodiment, the guide polynucleotide is a guide RNA (gRNA). gRNAs can exist as a complex of two or more RNAs, or as a single RNA molecule.

[0116] By “heterodimer” is meant a fusion protein comprising two domains, such as a wild type TadA domain and a variant of TadA domain or two variant TadA domains.

[0117] By “heterologous,” or “exogenous” is meant a polynucleotide or polypeptide that 1) has been experimentally incorporated to a polynucleotide or polypeptide sequence to which the polynucleotide or polypeptide is not normally found in nature; or 2) has been experimentally placed into a cell that does not normally comprise the polynucleotide or polypeptide. In some embodiments, “heterologous” means that a polynucleotide or polypeptide has been experimentally placed into a non-native context. In some embodiments, a heterologous polynucleotide or polypeptide is derived from a first species or host organism, and is incorporated into a polynucleotide or polypeptide derived from a second species or host organism. In some embodiments, the first species or host organism is different from the second species or host organism. In some embodiments the heterologous polynucleotide is DNA. In some embodiments the heterologous polynucleotide is RNA.

[0118] “Hybridization” means hydrogen bonding, which may be Watson-Crick, Hoogsteen or reversed Hoogsteen hydrogen bonding, between complementary nucleobases. For example, adenine and thymine are complementary nucleobases that pair through the formation of hydrogen bonds.

[0119] By “increases” is meant a positive alteration of at least 10%, 25%, 50%, 75%, or 100%.

[0120] The term “inhibitor of base repair” or “IBR” refers to a protein that is capable in inhibiting the activity of a nucleic acid repair enzyme, for example a base excision repair (BER) enzyme. In some embodiments, the IBR is an inhibitor of inosine base excision repair. Exemplary inhibitors of base repair include inhibitors of APE1, Endo III, Endo IV, Endo V, Endo VIII, Fpg, hOGG1, hNEIL1, T7 Endol, T4PDG, UDG, hSMUGI, and hAAG. In some embodiments, the IBR is an inhibitor of Endo V or hAAG. In some embodiments, the IBR is a catalytically inactive EndoV or a catalytically inactive hAAG. In some embodiments, the base repair inhibitor is an inhibitor of Endo V or hAAG. In some embodiments, the base repair inhibitor is a catalytically inactive EndoV or a catalytically inactive hAAG.

[0121] In some embodiments, the base repair inhibitor is uracil glycosylase inhibitor (UGI). UGI refers to a protein that is capable of inhibiting a uracil-DNA glycosylase base-excision repair enzyme. In some embodiments, a UGI domain comprises a wild-type UGI or a fragment of a wild-type UGI. In some embodiments, the UGI proteins provided herein include fragments of UGI and proteins homologous to a UGI or a UGI fragment. In some embodiments, the base repair inhibitor is an inhibitor of inosine base excision repair. In some embodiments, the base repair inhibitor is a “catalytically inactive inosine specific nuclease” or “dead inosine specific nuclease. Without wishing to be bound by any particular theory, catalytically inactive inosine glycosylases (e.g., alkyl adenine glycosylase (AAG)) can bind inosine, but cannot create an abasic site or remove the inosine, thereby sterically blocking the newly formed inosine moiety from DNA damage/repair mechanisms. In some embodiments, the catalytically inactive inosine specific nuclease can be capable of binding an inosine in a nucleic acid but does not cleave the nucleic acid. Non-limiting exemplary catalytically inactive inosine specific nucleases include catalytically inactive alkyl adenosine glycosylase (AAG nuclease), for example, from a human, and catalytically inactive endonuclease V (EndoV nuclease), for example, from E. coli. In some embodiments, the catalytically inactive AAG nuclease comprises an E125Q mutation or a corresponding mutation in another AAG nuclease.

[0122] An “intein” is a fragment of a protein that is able to excise itself and join the remaining fragments (the exteins) with a peptide bond in a process known as protein splicing.

[0123] The terms “isolated,” “purified,” or “biologically pure” refer to material that is free to varying degrees from components which normally accompany it as found in its native state. “Isolate” denotes a degree of separation from original source or surroundings. “Purify” denotes a degree of separation that is higher than isolation. A “purified” or “biologically pure” protein is sufficiently free of other materials such that any impurities do not materially affect the biological properties of the protein or cause other adverse consequences. That is, a nucleic acid or peptide as described herein is purified if it is substantially free of cellular material, viral material, or culture medium when produced by recombinant DNA techniques, or chemical precursors or other chemicals when chemically synthesized. Purity and homogeneity are typically determined using analytical chemistry techniques, for example, polyacrylamide gel electrophoresis or high-performance liquid chromatography. The term “purified” can denote that a nucleic acid or protein gives rise to essentially one band in an electrophoretic gel. For a protein that can be subjected to modifications, for example, phosphorylation or glycosylation, different modifications may give rise to different isolated proteins, which can be separately purified.

[0124] By “isolated polynucleotide” is meant a nucleic acid (e.g., a DNA) that is free of the genes which, in the naturally-occurring genome of the organism from which the nucleic acid molecule as described is derived, flank the gene. The term therefore includes, for example, a recombinant DNA that is incorporated into a vector; into an autonomously replicating plasmid or virus; or into the genomic DNA of a prokaryote or eukaryote; or that exists as a separate molecule (for example, a cDNA or a genomic or cDNA fragment produced by PCR or restriction endonuclease digestion) independent of other sequences. In addition, the term includes an RNA molecule that is transcribed from a DNA molecule, as well as a recombinant DNA that is part of a hybrid gene encoding additional polypeptide sequence.

[0125] By an “isolated polypeptide” is meant a polypeptide as described that has been separated from components that naturally accompany it. Typically, the polypeptide is isolated when it is at least 60%, by weight, free from the proteins and naturally-occurring organic molecules with which it is naturally associated. Preferably, the preparation comprises at least 75%, more preferably at least 90%, and most preferably at least 99%, by weight, a polypeptide as described herein. An isolated polypeptide as described herein may be obtained, for example, by extraction from a natural source, by expression of a recombinant nucleic acid encoding such a polypeptide; or by chemically synthesizing the protein. Purity can be measured by any appropriate method, for example, column chromatography, polyacrylamide gel electrophoresis, or by HPLC analysis.

[0126] The term “linker”, as used herein, refers to a molecule that links two moieties. In one embodiment, the term “linker” refers to a covalent linker (e.g., covalent bond) or a non-covalent linker.

[0127] By “marker” is meant any protein or polynucleotide having an alteration in expression level or activity that is associated with a disease or disorder, such as, GSD1a and/or symptoms thereof.

[0128] The term “mutation,” as used herein, refers to a substitution of a residue within a sequence, e.g., a nucleic acid or amino acid sequence, with another residue, or a deletion or insertion of one or more residues within a sequence. Mutations are typically described herein by identifying the original residue followed by the position of the residue within the sequence and by the identity of the newly substituted residue. Various methods for making the amino acid substitutions (mutations) provided herein are well known in the art, and are provided by, for example, Green and Sambrook, Molecular Cloning: A Laboratory Manual (4^{th} ed., Cold Spring Harbor Laboratory Press, Cold Spring Harbor, N.Y. (2012)).

[0129] The term “non-conservative mutations” involve amino acid substitutions between different groups, for example, lysine for tryptophan, or phenylalanine for serine, etc. In this case, it is preferable for the non-conservative amino acid substitution to not interfere with, or inhibit the biological activity of, the functional variant. The non-conservative amino acid substitution can enhance the biological activity of the functional variant, such that the biological activity of the functional variant is increased as compared to the wild-type protein.

[0130] The term “nuclear localization sequence,” “nuclear localization signal,” or “NLS” refers to an amino acid sequence that promotes import of a protein into the cell nucleus. Nuclear localization sequences are known in the art and described, for example, in Plank et al., International PCT application, PCT/EP2000/011690, filed Nov. 23, 2000, published as WO/2001/038547 on May 31, 2001, the contents of which are incorporated herein by reference for their disclosure of exemplary nuclear localization sequences. In other embodiments, the NLS is an optimized NLS described, for example, by Koblan et al., Nature Biotech. 2018 doi:10.1038/nbt.4172. In some embodiments, an NLS comprises the amino acid sequence In some embodiments, an NLS comprises the amino acid sequence

(SEQ ID NO: 190)
KRTADGSEFESPKKKRKV,
(SEQ ID NO: 191)
KRPAATKKAGQAKKKK,
(SEQ ID NO: 192)
KKTELQTTNAENKTKKL,
(SEQ ID NO: 193)
KRGINDRNFWRGENGRKTR,
(SEQ ID NO: 194)
RKSGKIAAIVVKRPRK,
(SEQ ID NO: 195)
PKKKRKV,
or
(SEQ ID NO: 196)
MDSLLMNRRKFLYQFKNVRWAKGRRETYLC.

[0131] The term “nucleobase,” “nitrogenous base,” or “base,” used interchangeably herein, refers to a nitrogen-containing biological compound that forms a nucleoside, which in turn is a component of a nucleotide. The ability of nucleobases to form base pairs and to stack one upon another leads directly to long-chain helical structures such as ribonucleic acid (RNA) and deoxyribonucleic acid (DNA). Five nucleobases—adenine (A), cytosine (C), guanine (G), thymine (T), and uracil (U)—are called primary or canonical. Adenine and guanine are derived from purine, and cytosine, uracil, and thymine are derived from pyrimidine. DNA and RNA can also contain other (non-primary) bases that are modified. Non-limiting exemplary modified nucleobases can include hypoxanthine, xanthine, 7-methylguanine, 5,6-dihydrouracil, 5-methylcytosine (m5C), and 5-hydromethylcytosine. Hypoxanthine and xanthine can be created through mutagen presence, both of them through deamination (replacement of the amine group with a carbonyl group). Hypoxanthine can be modified from adenine. Xanthine can be modified from guanine. Uracil can result from deamination of cytosine. A “nucleoside” consists of a nucleobase and a five carbon sugar (either ribose or deoxyribose). Examples of a nucleoside include adenosine, guanosine, uridine, cytidine, 5-methyluridine (m5U), deoxyadenosine, deoxyguanosine, thymidine, deoxyuridine, and deoxycytidine. Examples of a nucleoside with a modified nucleobase includes inosine (I), xanthosine (X), 7-methylguanosine (m7G), dihydrouridine (D), 5-methylcytidine (m5C), and pseudouridine (Ψ). A “nucleotide” consists of a nucleobase, a five carbon sugar (either ribose or deoxyribose), and at least one phosphate group.

[0132] The terms “nucleic acid” and “nucleic acid molecule,” as used herein, refer to a compound comprising a nucleobase and an acidic moiety, e.g., a nucleoside, a nucleotide, or a polymer of nucleotides. Typically, polymeric nucleic acids, e.g., nucleic acid molecules comprising three or more nucleotides are linear molecules, in which adjacent nucleotides are linked to each other via a phosphodiester linkage. In some embodiments, “nucleic acid” refers to individual nucleic acid residues (e.g. nucleotides and/or nucleosides). In some embodiments, “nucleic acid” refers to an oligonucleotide chain comprising three or more individual nucleotide residues. As used herein, the terms “oligonucleotide” and “polynucleotide” can be used interchangeably to refer to a polymer of nucleotides (e.g., a string of at least three nucleotides). In some embodiments, “nucleic acid” encompasses RNA as well as single and/or double-stranded DNA. Nucleic acids may be naturally occurring, for example, in the context of a genome, a transcript, an mRNA, tRNA, rRNA, siRNA, snRNA, a plasmid, cosmid, chromosome, chromatid, or other naturally occurring nucleic acid molecule. On the other hand, a nucleic acid molecule may be a non-naturally occurring molecule, e.g., a recombinant DNA or RNA, an artificial chromosome, an engineered genome, or fragment thereof, or a synthetic DNA, RNA, DNA/RNA hybrid, or including non-naturally occurring nucleotides or nucleosides. Furthermore, the terms “nucleic acid,” “DNA,” “RNA,” and/or similar terms include nucleic acid analogs, e.g., analogs having other than a phosphodiester backbone. Nucleic acids can be purified from natural sources, produced using recombinant expression systems and optionally purified, chemically synthesized, etc. Where appropriate, e.g., in the case of chemically synthesized molecules, nucleic acids can comprise nucleoside analogs such as analogs having chemically modified bases or sugars, and backbone modifications. A nucleic acid sequence is presented in the 5′ to 3′ direction unless otherwise indicated. In some embodiments, a nucleic acid is or comprises natural nucleosides (e.g. adenosine, thymidine, guanosine, cytidine, uridine, deoxyadenosine, deoxythymidine, deoxyguanosine, and deoxycytidine); nucleoside analogs (e.g., 2-aminoadenosine, 2-thiothymidine, inosine, pyrrolo-pyrimidine, 3-methyl adenosine, 5-methylcytidine, 2-aminoadenosine, C5-bromouridine, C5-fluorouridine, C5-iodouridine, C5-propynyl-uridine, C5-propynyl-cytidine, C5-methylcytidine, 2-aminoadenosine, 7-deazaadenosine, 7-deazaguanosine, 8-oxoadenosine, 8-oxoguanosine, 0(6)-methylguanine, and 2-thiocytidine); chemically modified bases; biologically modified bases (e.g., methylated bases); intercalated bases; modified sugars (e.g., 2′-fluororibose, ribose, 2′-deoxyribose, arabinose, and hexose); and/or modified phosphate groups (e.g., phosphorothioates and 5′-N-phosphoramidite linkages). In some embodiments, a polynucleotide described herein comprises one or more of the following modifications: 2′-O-methyl (2′-OMe), phosphorothioate (PS), 2′-O-methyl thioPACE (MSP), 2′-O-methyl-PACE (MP), 2′-fluoro RNA (2′-F-RNA), and constrained ethyl (S-cEt).

[0133] The term “nucleic acid programmable DNA binding protein” or “napDNAbp” may be used interchangeably with “polynucleotide programmable nucleotide binding domain” to refer to a protein that associates with a nucleic acid (e.g., DNA or RNA), such as a guide nucleic acid or guide polynucleotide (e.g., gRNA), that guides the napDNAbp to a specific nucleic acid sequence. In some embodiments, the polynucleotide programmable nucleotide binding domain is a polynucleotide programmable DNA binding domain. In some embodiments, the polynucleotide programmable nucleotide binding domain is a polynucleotide programmable RNA binding domain. In some embodiments, the polynucleotide programmable nucleotide binding domain is a Cas9 protein. A Cas9 protein can associate with a guide RNA that guides the Cas9 protein to a specific DNA sequence that is complementary to the guide RNA. In some embodiments, the napDNAbp is a Cas9 domain, for example a nuclease active Cas9, a Cas9 nickase (nCas9), or a nuclease inactive Cas9 (dCas9). Non-limiting examples of nucleic acid programmable DNA binding proteins include, Cas9 (e.g., dCas9 and nCas9), Cas12a/Cpf1, Cas12b/C2c1, Cas12c/C2c3, Cas12d/CasY, Cas12e/CasX, Cas12g, Cas12h, Cas12i, and Cas12j/CasΦ(Cas12j/CasΦ). Non-limiting examples of Cas enzymes include Cas1, Cas1B, Cas2, Cas3, Cas4, Cas5, Cas5d, Cas5t, Cas5h, Cas5a, Cas6, Cas7, Cas8, Cas8a, Cas8b, Cas8c, Cas9 (also known as Csn1 or Csx12), Cas10, Cas10d, Cas12a/Cpf1, Cas12b/C2c1 (e.g., SEQ ID NO: 232), Cas12c/C2c3, Cas12d/CasY, Cas12e/CasX, Cas12g, Cas12h, Cas12i, Cas12j/CasΦ, Cpf1, Csy1, Csy2, Csy3, Csy4, Cse1, Cse2, Cse3, Cse4, Cse5e, Csc1, Csc2, Csa5, Csn1, Csn2, Csm1, Csm2, Csm3, Csm4, Csm5, Csm6, Cmr1, Cmr3, Cmr4, Cmr5, Cmr6, Csb1, Csb2, Csb3, Csx17, Csx14, Csx10, Csx16, CsaX, Csx3, Csx1, Csx1S, Csx11, Csf1, Csf2, CsO, Csf4, Csd1, Csd2, Cst1, Cst2, Csh1, Csh2, Csa1, Csa2, Csa3, Csa4, Csa5, Type II Cas effector proteins, Type V Cas effector proteins, Type VI Cas effector proteins, CARF, DinG, homologues thereof, or modified or engineered versions thereof. Other nucleic acid programmable DNA binding proteins are also within the scope of this disclosure, although they may not be specifically listed in this disclosure. See, e.g., Makarova et al. “Classification and Nomenclature of CRISPR-Cas Systems: Where from Here?” CRISPR J. 2018 October; 1:325-336. doi: 10.1089/crispr.2018.0033; Yan et al., “Functionally diverse type V CRISPR-Cas systems” Science. 2019 Jan. 4; 363(6422):88-91. doi: 10.1126/science.aav7271, the entire contents of each are hereby incorporated by reference. Exemplary nucleic acid programmable DNA binding proteins and nucleic acid sequences encoding nucleic acid programmable DNA binding proteins are provided in the Sequence Listing as SEQ ID NOs: 197-230.

[0134] The terms “nucleobase editing domain” or “nucleobase editing protein,” as used herein, refers to a protein or enzyme that can catalyze a nucleobase modification in RNA or DNA, such as cytosine (or cytidine) to uracil (or uridine) or thymine (or thymidine), and adenine (or adenosine) to hypoxanthine (or inosine) deaminations, as well as non-templated nucleotide additions and insertions. In some embodiments, the nucleobase editing domain is a deaminase domain (e.g., an adenine deaminase or an adenosine deaminase; or a cytidine deaminase or a cytosine deaminase).

[0135] As used herein, “obtaining” as in “obtaining an agent” includes synthesizing, purchasing, or otherwise acquiring the agent.

[0136] A “patient” or “subject” as used herein refers to a mammalian subject or individual diagnosed with, at risk of having or developing, or suspected of having or developing a disease or a disorder. In some embodiments, the term “patient” refers to a mammalian subject with a higher than average likelihood of developing a disease or a disorder. Exemplary patients can be humans, non-human primates, cats, dogs, pigs, cattle, cats, horses, camels, llamas, goats, sheep, rodents (e.g., mice, rabbits, rats, or guinea pigs) and other mammalians that can benefit from the therapies disclosed herein. Exemplary human patients can be male and/or female.

[0137] “Patient in need thereof” or “subject in need thereof” is referred to herein as a patient diagnosed with, at risk or having, predetermined to have, or suspected of having a disease or disorder, for instance, but not restricted to Glycogen Storage Disease Type 1 (GSD1 or Von Gierke Disease).

[0138] The terms “pathogenic mutation,” “pathogenic variant,” “disease casing mutation,” “disease causing variant,” “deleterious mutation,” or “predisposing mutation” refers to a genetic alteration or mutation that increases an individual's susceptibility or predisposition to a certain disease or disorder. In some embodiments, the pathogenic mutation comprises at least one wild-type amino acid substituted by at least one pathogenic amino acid in a protein encoded by a gene.

[0139] The term “pharmaceutically-acceptable carrier” means a pharmaceutically-acceptable material, composition, or vehicle, such as a liquid or solid filler, diluent, excipient, manufacturing aid (e.g., lubricant, talc magnesium, calcium or zinc stearate, or steric acid), or solvent encapsulating material, involved in carrying or transporting the compound from one site (e.g., the delivery site) of the body, to another site (e.g., organ, tissue or portion of the body). A pharmaceutically acceptable carrier is “acceptable” in the sense of being compatible with the other ingredients of the formulation and not injurious to the tissue of the subject (e.g., physiologically compatible, sterile, physiologic pH, etc.). The terms such as “excipient,” “carrier,” “pharmaceutically acceptable carrier,” “vehicle,” or the like are used interchangeably herein.

[0140] The term “pharmaceutical composition” means a composition formulated for pharmaceutical use. In some embodiments, the pharmaceutical composition further comprises a pharmaceutically acceptable carrier. In some embodiments, the pharmaceutical composition comprises additional agents (e.g., for specific delivery, increasing half-life, or other therapeutic compounds).

The terms “protein”, “peptide”, “polypeptide”, and their grammatical equivalents are used interchangeably herein, and refer to a polymer of amino acid residues linked together by peptide (amide) bonds. A protein, peptide, or polypeptide can be naturally occurring, recombinant, or synthetic, or any combination thereof.

[0141] The term “fusion protein” as used herein refers to a hybrid polypeptide which comprises protein domains from at least two different proteins.

[0142] By “promoter” is meant an array of nucleic acid control sequences, which direct transcription of a nucleic acid. A promoter includes necessary nucleic acid sequences near the start site of transcription. A promoter also optionally includes distal enhancer or repressor sequence elements. A “constitutive promoter” is a promoter that is continuously active and is not subject to regulation by external signals or molecules. In contrast, the activity of an “inducible promoter” is regulated by an external signal or molecule (for example, a transcription factor). By way of example, a promoter may be a CMV promoter.

[0143] The term “recombinant” as used herein in the context of proteins or nucleic acids refers to proteins or nucleic acids that do not occur in nature, but are the product of human engineering. For example, in some embodiments, a recombinant protein or nucleic acid molecule comprises an amino acid or nucleotide sequence that comprises at least one, at least two, at least three, at least four, at least five, at least six, or at least seven mutations as compared to any naturally occurring sequence.

[0144] By “reduces” is meant a negative alteration of at least 10%, 25%, 50%, 75%, or 100%.

[0145] By “reference” is meant a standard or control condition. In one embodiment, the reference is a wild-type or healthy cell. For example, in some embodiments the reference is a cell of a subject not inflicted with GSD1a. In some embodiments, the reference is a cell with normal or wild-type glucose-6-phosphatase activity. In other embodiments and without limitation, a reference is an untreated cell that is not subjected to a test condition, or is subjected to placebo or normal saline, medium, buffer, and/or a control vector that does not harbor a polynucleotide of interest.

[0146] A “reference sequence” is a defined sequence used as a basis for sequence comparison. A reference sequence may be a subset of or the entirety of a specified sequence; for example, a segment of a full-length cDNA or gene sequence, or the complete cDNA or gene sequence. For polypeptides, the length of the reference polypeptide sequence will generally be at least about 16 amino acids, at least about 20 amino acids, at least about 25 amino acids, about 35 amino acids, about 50 amino acids, or about 100 amino acids. For nucleic acids, the length of the reference nucleic acid sequence will generally be at least about 50 nucleotides, at least about 60 nucleotides, at least about 75 nucleotides, about 100 nucleotides or about 300 nucleotides or any integer thereabout or therebetween. In some embodiments, a reference sequence is a wild-type sequence of a protein of interest. In other embodiments, a reference sequence is a polynucleotide sequence encoding a wild-type protein.

[0147] The term “RNA-programmable nuclease,” and “RNA-guided nuclease” are used with (e.g., binds or associates with) one or more RNA(s) that is not a target for cleavage. In some embodiments, an RNA-programmable nuclease, when in a complex with an RNA, may be referred to as a nuclease:RNA complex. Typically, the bound RNA(s) is referred to as a guide RNA (gRNA). In some embodiments, the RNA-programmable nuclease is the (CRISPR-associated system) Cas9 endonuclease, for example, Cas9 (Csn1) from Streptococcus pyogenes.

[0148] The term “single nucleotide polymorphism (SNP)” is a variation in a single nucleotide that occurs at a specific position in the genome, where each variation is present to some appreciable degree within a population (e.g., >1%).

[0149] By “specifically binds” is meant a nucleic acid molecule, polypeptide, or complex thereof (e.g., a nucleic acid programmable DNA binding protein, a guide nucleic acid), compound, or molecule that recognizes and binds a polypeptide and/or nucleic acid molecule as described herein, but which does not substantially recognize and bind other molecules in a sample, for example, a biological sample.

[0150] By “substantially identical” is meant a polypeptide or nucleic acid molecule exhibiting at least 50% identity to a reference amino acid sequence. In one embodiment, a reference sequence is a wild-type amino acid or nucleic acid sequence. In another embodiment, a reference sequence is any one of the amino acid or nucleic acid sequences described herein. In one embodiment, such a sequence is at least 60%, 80%, 85%, 90%, 95% or even 99% identical at the amino acid level or nucleic acid level to the sequence used for comparison.

[0151] Sequence identity is typically measured using sequence analysis software (for example, Sequence Analysis Software Package of the Genetics Computer Group, University of Wisconsin Biotechnology Center, 1710 University Avenue, Madison, Wis. 53705, BLAST, BESTFIT, GAP, or PILEUP/PRETTYBOX programs). Such software matches identical or similar sequences by assigning degrees of homology to various substitutions, deletions, and/or other modifications. Conservative substitutions typically include substitutions within the following groups: glycine, alanine; valine, isoleucine, leucine; aspartic acid, glutamic acid, asparagine, glutamine; serine, threonine; lysine, arginine; and phenylalanine, tyrosine. In an exemplary approach to determining the degree of identity, a BLAST program may be used, with a probability score between e⁻³ and e⁻¹⁰⁰ indicating a closely related sequence.

COBALT is used, for example, with the following parameters:
[0152] a) alignment parameters: Gap penalties-11,-1 and End-Gap penalties-5,-1,
[0153] b) CDD Parameters: Use RPS BLAST on; Blast E-value 0.003; Find Conserved columns and Recompute on, and
[0154] c) Query Clustering Parameters: Use query clusters on; Word Size 4; Max cluster distance 0.8; Alphabet Regular.
   EMBOSS Needle is used, for example, with the following parameters:
[0155] a) Matrix: BLOSUM62;
[0156] b) GAP OPEN: 10;
[0157] c) GAP EXTEND: 0.5;
[0158] d) OUTPUT FORMAT: pair;
[0159] e) END GAP PENALTY: false;
[0160] f) END GAP OPEN: 10; and
[0161] g) END GAP EXTEND: 0.5.

[0162] Nucleic acid molecules useful in the methods of the invention include any nucleic acid molecule that encodes a polypeptide of the invention or a fragment thereof. Such nucleic acid molecules need not be 100% identical with an endogenous nucleic acid sequence, but will typically exhibit substantial identity. Polynucleotides having “substantial identity” to an endogenous sequence are typically capable of hybridizing with at least one strand of a double-stranded nucleic acid molecule. Nucleic acid molecules useful in the methods of the invention include any nucleic acid molecule that encodes a polypeptide of the invention or a fragment thereof. Such nucleic acid molecules need not be 100% identical with an endogenous nucleic acid sequence, but will typically exhibit substantial identity. Polynucleotides having “substantial identity” to an endogenous sequence are typically capable of hybridizing with at least one strand of a double-stranded nucleic acid molecule. By “hybridize” is meant pair to form a double-stranded molecule between complementary polynucleotide sequences (e.g., a gene described herein), or portions thereof, under various conditions of stringency. (See, e.g., Wahl, G. M. and S. L. Berger (1987) Methods Enzymol. 152:399; Kimmel, A. R. (1987) Methods Enzymol. 152:507).

[0163] For example, stringent salt concentration will ordinarily be less than about 750 mM NaCl and 75 mM trisodium citrate, preferably less than about 500 mM NaCl and 50 mM trisodium citrate, and more preferably less than about 250 mM NaCl and 25 mM trisodium citrate. Low stringency hybridization can be obtained in the absence of organic solvent, e.g., formamide, while high stringency hybridization can be obtained in the presence of at least about 35% formamide, and more preferably at least about 50% formamide. Stringent temperature conditions will ordinarily include temperatures of at least about 30° C., more preferably of at least about 37° C., and most preferably of at least about 42° C. Varying additional parameters, such as hybridization time, the concentration of detergent, e.g., sodium dodecyl sulfate (SDS), and the inclusion or exclusion of carrier DNA, are well known to those skilled in the art. Various levels of stringency are accomplished by combining these various conditions as needed. In a preferred: embodiment, hybridization will occur at 30° C. in 750 mM NaCl, 75 mM trisodium citrate, and 1% SDS. In a more preferred embodiment, hybridization will occur at 37° C. in 500 mM NaCl, 50 mM trisodium citrate, 1% SDS, 35% formamide, and 100 μg/ml denatured salmon sperm DNA (ssDNA). In a most preferred embodiment, hybridization will occur at 42° C. in 250 mM NaCl, 25 mM trisodium citrate, 1% SDS, 50% formamide, and 200 μg/ml ssDNA. Useful variations on these conditions will be readily apparent to those skilled in the art.

[0164] For most applications, washing steps that follow hybridization will also vary in stringency. Wash stringency conditions can be defined by salt concentration and by temperature. As above, wash stringency can be increased by decreasing salt concentration or by increasing temperature. For example, stringent salt concentration for the wash steps will preferably be less than about 30 mM NaCl and 3 mM trisodium citrate, and most preferably less than about 15 mM NaCl and 1.5 mM trisodium citrate. Stringent temperature conditions for the wash steps will ordinarily include a temperature of at least about 25° C., more preferably of at least about 42° C., and even more preferably of at least about 68° C. In an embodiment, wash steps will occur at 25° C. in 30 mM NaCl, 3 mM trisodium citrate, and 0.1% SDS. In another embodiment, wash steps will occur at 42 C in 15 mM NaCl, 1.5 mM trisodium citrate, and 0.1% SDS. In a more preferred embodiment, wash steps will occur at 68° C. in 15 mM NaCl, 1.5 mM trisodium citrate, and 0.1% SDS. Additional variations on these conditions will be readily apparent to those skilled in the art. Hybridization techniques are well known to those skilled in the art and are described, for example, in Benton and Davis (Science 196:180, 1977); Grunstein and Hogness (Proc. Natl. Acad. Sci., USA 72:3961, 1975); Ausubel et al. (Current Protocols in Molecular Biology, Wiley Interscience, New York, 2001); Berger and Kimmel (Guide to Molecular Cloning Techniques, 1987, Academic Press, New York); and Sambrook et al., Molecular Cloning: A Laboratory Manual, Cold Spring Harbor Laboratory Press, New York.

[0165] By “split” is meant divided into two or more fragments.

[0166] A “split Cas9 protein” or “split Cas9” refers to a Cas9 protein that is provided as an N-terminal fragment and a C-terminal fragment encoded by two separate nucleotide sequences. The polypeptides corresponding to the N-terminal portion and the C-terminal portion of the Cas9 protein may be spliced to form a “reconstituted” Cas9 protein.

[0167] By “subject” is meant a mammal, including, but not limited to, a human or non-human mammal, such as a bovine, equine, canine, ovine, or feline. Subjects include livestock, domesticated animals raised to produce labor and to provide commodities, such as food, including without limitation, cattle, goats, chickens, horses, pigs, rabbits, and sheep.

[0168] By “substantially identical” is meant a polypeptide or nucleic acid molecule exhibiting at least 50% identity to a reference amino acid sequence (for example, any one of the amino acid sequences described herein) or nucleic acid sequence (for example, any one of the nucleic acid sequences described herein). In one embodiment, such a sequence is at least 60%, 80% or 85%, 90%, 95% or even 99% identical at the amino acid level or nucleic acid to the sequence used for comparison.

[0169] Sequence identity is typically measured using sequence analysis software (for example, Sequence Analysis Software Package of the Genetics Computer Group, University of Wisconsin Biotechnology Center, 1710 University Avenue, Madison, Wis. 53705, BLAST, BESTFIT, COBALT, EMBOSS Needle, GAP, or PILEUP/PRETTYBOX programs). Such software matches identical or similar sequences by assigning degrees of homology to various substitutions, deletions, and/or other modifications. Conservative substitutions typically include substitutions within the following groups: glycine, alanine; valine, isoleucine, leucine; aspartic acid, glutamic acid, asparagine, glutamine; serine, threonine; lysine, arginine; and phenylalanine, tyrosine. In an exemplary approach to determining the degree of identity, a BLAST program may be used, with a probability score between e⁻³ and e⁻¹⁰⁰ indicating a closely related sequence.

COBALT is used, for example, with the following parameters:
[0170] a) alignment parameters: Gap penalties-11,-1 and End-Gap penalties-5,-1,
[0171] b) CDD Parameters: Use RPS BLAST on; Blast E-value 0.003; Find Conserved columns and Recompute on, and
[0172] c) Query Clustering Parameters: Use query clusters on; Word Size 4; Max cluster distance 0.8; Alphabet Regular.
   EMBOSS Needle is used, for example, with the following parameters:
[0173] a) Matrix: BLOSUM62;
[0174] b) GAP OPEN: 10;
[0175] c) GAP EXTEND: 0.5;
[0176] d) OUTPUT FORMAT: pair;
[0177] e) END GAP PENALTY: false;
[0178] f) END GAP OPEN: 10; and
[0179] g) END GAP EXTEND: 0.5.

[0180] The term “target site” refers to a sequence within a nucleic acid molecule that is modified by a nucleobase editor. In one embodiment, the target site is deaminated by a deaminase or a fusion protein comprising a deaminase (e.g., adenine deaminase).

[0181] As used herein “transduction” means to transfer a gene or genetic material to a cell via a viral vector.

[0182] “Transformation,” as used herein refers to the process of introducing a genetic change in a cell produced by the introduction of exogenous nucleic acid.

[0183] “Transfection” refers to the transfer of a gene or genetical material to a cell via a chemical or physical means.

[0184] By “translocation” is meant the rearrangement of nucleic acid segments between non-homologous chromosomes.

[0185] As used herein, the terms “treat,” treating,” “treatment,” and the like refer to reducing or ameliorating a disorder and/or symptom(s) associated therewith or obtaining a desired pharmacologic and/or physiologic effect. It will be appreciated that, although not precluded, treating a disorder or condition does not require that the disorder, condition or symptoms associated therewith be completely eliminated. In some embodiments, the effect is therapeutic, i.e., without limitation, the effect partially or completely reduces, diminishes, abrogates, abates, alleviates, decreases the intensity of, or cures a disease and/or adverse symptom attributable to the disease. In some embodiments, the effect is preventative, i.e., the effect protects or prevents an occurrence or reoccurrence of a disease or condition. To this end, the presently disclosed methods comprise administering a therapeutically effective amount of a compositions as described herein.

[0186] By “uracil glycosylase inhibitor” or “UGI” is meant an agent that inhibits the uracil-excision repair system. In one embodiment, the agent is a protein or fragment thereof that binds a host uracil-DNA glycosylase and prevents removal of uracil residues from DNA. In an embodiment, a UGI is a protein, a fragment thereof, or a domain that is capable of inhibiting a uracil-DNA glycosylase base-excision repair enzyme. In some embodiments, a UGI domain comprises a wild-type UGI or a modified version thereof. In some embodiments, a UGI domain comprises a fragment of the exemplary amino acid sequence set forth below. In some embodiments, a UGI fragment comprises an amino acid sequence that comprises at least 60%, at least 65%, at least 70%, at least 75%, at least 80%, at least 85%, at least 90%, at least 95%, at least 96%, at least 97%, at least 98%, at least 99%, or 100% of the exemplary UGI sequence provided below. In some embodiments, a UGI comprises an amino acid sequence that is homologous to the exemplary UGI amino acid sequence or fragment thereof, as set forth below. In some embodiments, the UGI, or a portion thereof, is at least 70%, at least 75%, at least 80%, at least 85%, at least 90%, at least 95%, at least 96%, at least 97%, at least 98%, at least 99%, at least 99.5%, at least 99.9%, or 100% identical to a wild-type UGI or a UGI sequence, or portion thereof, as set forth below. An exemplary UGI comprises an amino acid sequence as follows: >sp1P14739IUNGI_BPPB2 Uracil-DNA glycosylase inhibitor

(SEQ ID NO: 231)
MTNLSDIIEKETGKOLVIQESILMLPEEVEEVIGNKPESDILVHTAYDES
TDENVMLLTSDAPEYKPWALVIQDSNGENKIKML.

[0187] The term “vector” refers to a means of introducing a nucleic acid sequence into a cell, resulting in a transformed cell. Vectors include plasmids, transposons, phages, viruses, liposomes, and episome. “Expression vectors” are nucleic acid sequences comprising the nucleotide sequence to be expressed in the recipient cell. Expression vectors may include additional nucleic acid sequences to promote and/or facilitate the expression of the of the introduced sequence such as start, stop, enhancer, promoter, and secretion sequences.

[0188] The recitation of a listing of chemical groups in any definition of a variable herein includes definitions of that variable as any single group or combination of listed groups. The recitation of an embodiment for a variable or aspect herein includes that embodiment as any single embodiment or in combination with any other embodiments or portions thereof.

[0189] Any compositions or methods provided herein can be combined with one or more of any of the other compositions and methods provided herein.

[0190] DNA editing has emerged as a viable means to modify disease states by correcting pathogenic mutations at the genetic level. Until recently, all DNA editing platforms have functioned by inducing a DNA double strand break (DSB) at a specified genomic site and relying on endogenous DNA repair pathways to determine the product outcome in a semi-stochastic manner, resulting in complex populations of genetic products. Though precise, user-defined repair outcomes can be achieved through the homology directed repair (HDR) pathway, a number of challenges have prevented high efficiency repair using HDR in therapeutically-relevant cell types. In practice, this pathway is inefficient relative to the competing, error-prone non-homologous end joining pathway. Further, HDR is tightly restricted to the G1 and S phases of the cell cycle, preventing precise repair of DSBs in post-mitotic cells. As a result, it has proven difficult or impossible to alter genomic sequences in a user-defined, programmable manner with high efficiencies in these populations.

### BRIEF DESCRIPTION OF THE DRAWINGS

[0191] FIG. 1 provides a schematic depicting a G6PC nucleotide target sequence (ATTCTCTTTGGACAGTGTCCATACTGGTGG; SEQ ID NO 399) and corresponding amino acid sequence (ILFGQCPYWW; SEQ ID NO: 401) indicating bystander and on target A>G bases for correction of the GSD1a R83C mutation.

[0192] FIGS. 2A and 2B depict in vivo correction of GSD1a mutations in liver extracts of transgenic mouse models heterozygous for huG6PC-R83C. FIG. 2A is a schematic depicting in vivo workflow. Lipid nanoparticles (LNP) carrying base editor mRNA and gRNA were dosed via IV injection in transgenic mice heterozygous for huG6PC (huR83C TET), harboring the R83C mutation. FIG. 2B is a bar graph depicting A to G base editing efficiency of the GSD1a R83C mutation using MSP828 comparing on-target to bystander editing.

[0193] FIG. 3 is a bar graph depicting correction of the GSD1a R83C mutation in a transgenic mouse model heterozygous for huG6PC, harboring the R83C mutation, using TadA adenosine deaminase variants MSP605, MSP824, MSP825, MSP680, MSP828, and MSP820. In vitro screens were run to select desirable base-editors for R83C correction. LNP co-formulations of gRNA and representative base-editors were dosed (at a sub-saturating dose of 1 mpk), in vivo, in transgenic mice heterozygous for huG6PC-R83C. The base-editing potency of the variants for the R83C correction in livers of the LNP-treated, huG6PC-R83C heterozygote, transgenic animals are shown in FIG. 3. Variant MSP828 yielded a high level of on-target activity under these conditions. A to G base editing efficiency is shown for on-target and bystander editing.

[0194] FIG. 4 shows schematics depicting normal and loss-of-function g6pc function and related outcomes. GSD-Ia (or GSD1a herein) is an autosomal recessive disorder caused by mutations in the g6pc gene. R83C, located in the active site of the enzyme, is the most prevalent pathogenic mutation identified in Caucasian GSD-Ia patients and is associated with inactivation of G6Pase. A loss of G6Pase function can result in life-threatening hypoglycemia, seizures and even death. To mitigate hypoglycemia, patients must maintain strict and frequent adherence to glucose supplementation through day and night, by way of a slow glucose release formula. One missed or delayed dose can result in emergency hypoglycemia. Among many complications, enlarged liver, accumulation of uric acid, lactate, and lipids are common in GSD-Ia patients.

[0195] FIG. 5 shows a schematic illustrating that base editors as described herein generate permanent, predicted nucleotide substitutions in an editing window. The R83C mutation introduces a single G>A conversion in the g6pc gene. Adenine base editors (ABEs) enable the programmable conversion of A to G in genomic DNA and thus may be used to correct this mutation. FIG. 5 depicts the utility of ABEs and base editing as described herein. ABE binds to target DNA that is complementary to the guide-RNA and exposes a stretch of single-stranded DNA. The deaminase converts the target adenine into inosine, and the Cas enzyme nicks the opposite strand, which is then repaired, completing the base pair conversion. The direct repair of a point mutation has the potential for restoration of gene function.

[0196] FIGS. 6A and 6B provide a depiction of the target nucleotide site, and bystander and PAM nucleotides and a bar graph showing that ABEs used in immortalized HEK293 cells yield a significant rate of precise correction of R83C. Base-editors for A>G conversion in the g6pc gene were optimized for correction of R83C. Shown in FIG. 6A is the target DNA sequence (CCACCAGTATGGACACTGTCCAAAGAGAAT (SEQ ID NO: 402)) and underlying amino acid translation (WWYPCQGFLI; SEQ ID NO: 403) for the GSD-Ia R83C mutation. The target edit is shown by double-underlining, at position 12. The editing window also includes a possible bystander, shown by single-underlining at position 6, and an edit that may result in a synonymous conversion is shown at position 10. For screening, a HEK293 cell line was generated to express the g6pc transgene harboring the R83C mutation and was transfected with base-editor mRNA and gRNA. Allele frequencies were assessed by high-throughput targeted amplicon Next-Generation Sequencing (NGS). Variants 1-5 represent a combination of gRNA and base-editor RNA, engineered for optimized target correction. Variant 5 yielded approximately 60% targeted base-editing efficiency for R83C correction with limited bystander editing (FIG. 6B).

[0197] FIG. 7 presents a photographic image and bar graphs demonstrating that 3-week-old homozygous huR83C (Hom huR83C) mice exhibited expected growth impairment and metabolic defects characteristic of GSD-1a. For the experients, a GSD-Ia mouse that expresses the human G6PC-R83C transgene in place of mouse G6PC was generated to validate base-editing in vivo. The results shown confirmed that mice homozygous for huR83C exhibited postnatal lethality—they were either stillborn or died within 24 hours. On glucose supplementation therapy, the animals survived to at least 3 weeks of age and revealed characteristic pathological signatures of GSD-Ia, with reduced body weight, enlarged livers, significant G6Pase inhibition, and abnormal serum metabolites as compared to littermate controls, a phenotype that is consistent with clinical and published reports.

[0198] FIGS. 8A and 8B show dot plots of in vivo correction achieved by the base editors (ABEs) described herein. FIG. 8A illustrates efficient lipid nanoparticle (LNP)-mediated base editing (huG6PC-R83C correction) in livers of adult and newborn heterozygous huR83C mice. To validate base-editing efficiency for R83C correction in vivo, LNP-mediated delivery was first optimized in less fragile transgenic mice heterozygous for huR83C. The schematic in FIG. 2A depicts in vivo workflow for these experiments, with lipid nanoparticle (LNP), or LNP co-formulations of base-editor mRNA and gRNA dosed via IV injection.

[0199] Given neonatal lethality of the homozygous mice, LNP-dosing was employed via the temporal vein of heterozygous huR83C mice shortly post birth, and activity was compared to that seen in adult heterozygous huR83C mice that had received LNP administered via the tail vein. NGS analysis of whole liver extracts revealed approximately 40% base-editing efficiency in adults and up to ˜60% efficiency in newborns, with a broader range in efficiencies. Bystander editing remained low in adults and newborns. FIG. 8B shows that LNP-mediated R83C correction in livers is associated with survival of newborn homozygous huR83C mice and littermate heterozygous huR83C mice. Briefly, newborn mice homozygous for huR83C were treated with LNP containing guide RNA and mRNA encoding ABE. The treated mice grew normally to 3 weeks of age, without hypoglycemia-induced seizures, in the absence of glucose therapy. The treated homozygous huR83C mice displayed editing efficiencies up to ˜60% in total liver extracts (i.e., ˜60% R83C correction), consistent with littermate controls that were heterozygous for huR83C.

[0200] FIGS. 9A and 9B show bar graphs and immunohistochemical staining images demonstrating the base editing as described herein in mice homozygous for huG6PC-R83C restores near-normal metabolic function to reverse GSD-Ia pathology. At 3 weeks, it was validated that the treated homozygous huR83C mice displayed proper metabolic function, with restoration of near-normal serum metabolite markers, including glucose, triglycerides, cholesterol, lactate, and uric acid, as shown by the darkest bars in the graph in FIG. 9A. Moreover, biochemical assays of G6PC activity (as assessed biochemically and via lead-phosphate staining) in LNP-treated homozygous huR83C mice were consistent with that of litter-mate controls. Hepatomegaly, another clinical presentation of GSD-Ia, is caused primarily by excess glycogen and lipid deposition. Immuno-histochemical analysis revealed normal hepatocyte size and lipid deposition in LNP-treated mice (FIG. 9B). The results demonstrate the potential of base-editing to correct the R83C mutation and the metabolic defects associated with GSD-Ia.

[0201] FIG. 10 shows a bar graph demonstrating that a single LNP dose administration in homozygous huG6PC-R83C mice maintained euglycemia during a 24-hour fasting challenge via base-editing as described herein.

[0202] FIG. 11 shows a bar graph demonstrating the results of experiments in which representative heavy mods gRNAs (heavy mod series 1 gRNAs for R83C (saCas9), Example 5) were used in experiments in which adult transgenic mice heterozygous for huG6PC-R83C were dosed at a sub-saturating dose of 1 mpk of 1:1 ratio of gRNA:editor mRNA.

[0203] FIG. 12 presents a graph illustrating Kaplan-Meier survival curves generated to estimate the survival of newborn transgenic mice homozygous for huG6PC-R83C, either post base-editing via ABE mRNA (ABE-treated) or untreated (Untreated). The top line plot on the graph represents the survival of animals following base-editing via ABE mRNA (ABE-treated), (100% survival over time (3 wks)), as described herein (Example 2). The leftmost line plot on the graph represents the survival of untreated animals over time (poor to no survival at less than 1 week).

### DETAILED DESCRIPTION OF THE EMBODIMENTS

[0204] Provided and featured herein are compositions comprising novel adenosine base editors that have increased efficiency and methods of using base editors comprising adenosine deaminase variants for altering mutations associated with Glycogen Storage Disease Type 1a (GSD1a).

[0205] The embodiments described herein are based, at least in part, on the discovery that a base editor featuring adenosine deaminase variants (e.g., adenosine deaminase variants that comprise a combination of alterations in a TadA*7.10 amino acid sequence, where the combination of alterations is V82G, Y147T/D, Q154S, and one or more of L36H, I76Y, F149Y, N157K, and D167N, or a corresponding combination of alterations in another adenosine deaminase) precisely corrects single nucleotide polymorphisms in the endogenous glucose-6-phosphatase (G6PC) gene (e.g. R83C, Q347X).

[0206] The GSD1a mutations, R83C and Q347X, are cytidine to thymidine (C→T) transition mutations, resulting in a C·G to T·A base pair substitution. These substitutions may be reverted back to a wild-type, non-pathogenic genomic sequence with an adenosine base editor (ABE) which catalyzes A·T to G·C substitutions. By extension, GSD1a-causing mutations are potential targets for reversion to wild-type sequence using ABEs without the risks of inducing G6PC gene overexpression, as may occur using gene therapy. Accordingly, A·T to G·C DNA base editing precisely corrects one or more of the most prevalent GSD1a-causing mutations in the G6PC gene.

### Nucleobase Editors

[0207] Useful in the methods and compositions described herein are nucleobase editors that edit, modify or alter a target nucleotide sequence of a polynucleotide. Nucleobase editors described herein typically include a polynucleotide programmable nucleotide binding domain and a nucleobase editing domain (e.g., adenosine deaminase or cytidine deaminase). A polynucleotide programmable nucleotide binding domain, when in conjunction with a bound guide polynucleotide (e.g., gRNA), can specifically bind to a target polynucleotide sequence and thereby localize the base editor to the target nucleic acid sequence desired to be edited.

[0208] In certain embodiments, the nucleobase editors provided herein comprise one or more features that improve base editing activity. For example, any of the nucleobase editors provided herein may comprise a Cas9 domain that has reduced nuclease activity. In some embodiments, any of the nucleobase editors provided herein may have a Cas9 domain that does not have nuclease activity (dCas9), or a Cas9 domain that cuts one strand of a duplexed DNA molecule, referred to as a Cas9 nickase (nCas9). Without wishing to be bound by any particular theory, the presence of the catalytic residue (e.g., H840) maintains the activity of the Cas9 to cleave the non-edited (e.g., non-deaminated) strand opposite the targeted nucleobase. Mutation of the catalytic residue (e.g., D10 to A10) prevents cleavage of the edited (e.g., deaminated) strand containing the targeted residue (e.g., A or C). Such Cas9 variants can generate a single-strand DNA break (nick) at a specific location based on the gRNA-defined target sequence, leading to repair of the non-edited strand, ultimately resulting in a nucleobase change on the non-edited strand.

### Polynucleotide Programmable Nucleotide Binding Domain

[0209] Polynucleotide programmable nucleotide binding domains bind polynucleotides (e.g., RNA, DNA). A polynucleotide programmable nucleotide binding domain of a base editor can itself comprise one or more domains (e.g., one or more nuclease domains). In some embodiments, the nuclease domain of a polynucleotide programmable nucleotide binding domain can comprise an endonuclease or an exonuclease. An endonuclease can cleave a single strand of a double-stranded nucleic acid or both strands of a double-stranded nucleic acid molecule. In some embodiments, a nuclease domain of a polynucleotide programmable nucleotide binding domain can cut zero, one, or two strands of a target polynucleotide.

[0210] Non-limiting examples of a polynucleotide programmable nucleotide binding domain which can be incorporated into a base editor include a CRISPR protein-derived domain, a restriction nuclease, a meganuclease, TAL nuclease (TALEN), and a zinc finger nuclease (ZFN). In some embodiments, a base editor comprises a polynucleotide programmable nucleotide binding domain comprising a natural or modified protein or portion thereof which via a bound guide nucleic acid is capable of binding to a nucleic acid sequence during CRISPR (i.e., Clustered Regularly Interspaced Short Palindromic Repeats)-mediated modification of a nucleic acid. Such a protein is referred to herein as a “CRISPR protein.” Accordingly, disclosed herein is a base editor comprising a polynucleotide programmable nucleotide binding domain comprising all or a portion of a CRISPR protein (i.e. a base editor comprising as a domain all or a portion of a CRISPR protein, also referred to as a “CRISPR protein-derived domain” of the base editor). A CRISPR protein-derived domain incorporated into a base editor can be modified compared to a wild-type or natural version of the CRISPR protein. For example, as described below a CRISPR protein-derived domain can comprise one or more mutations, insertions, deletions, rearrangements and/or recombinations relative to a wild-type or natural version of the CRISPR protein.

[0211] Cas proteins that can be used herein include class 1 and class 2. Non-limiting examples of Cas proteins include Cas1, Cas1B, Cas2, Cas3, Cas4, Cas5, Cas5d, Cas5t, Cas5h, Cas5a, Cas6, Cas7, Cas8, Cas9 (also known as Csn1 or Csx12), Cas10, Csy1, Csy2, Csy3, Csy4, Cse1, Cse2, Cse3, Cse4, Cse5e, Csc1, Csc2, Csa5, Csn1, Csn2, Csm1, Csm2, Csm3, Csm4, Csm5, Csm6, Cmr1, Cmr3, Cmr4, Cmr5, Cmr6, Csb1, Csb2, Csb3, Csx17, Csx14, Csx10, Csx16, CsaX, Csx3, Csx1, Csx1S, Csf1, Csf2, CsO, Csf4, Csd1, Csd2, Cst1, Cst2, Csh1, Csh2, Csa1, Csa2, Csa3, Csa4, Csa5, Cas12a/Cpf1, Cas12b/C2c1 (e.g., SEQ ID NO: 232), Cas12c/C2c3, Cas12d/CasY, Cas12e/CasX, Cas12g, Cas12h, Cas12i, and Cas12j/CasΦ, CARF, DinG, homologues thereof, or modified versions thereof. A CRISPR enzyme can direct cleavage of one or both strands at a target sequence, such as within a target sequence and/or within a complement of a target sequence. For example, a CRISPR enzyme can direct cleavage of one or both strands within about 1, 2, 3, 4, 5, 6, 7, 8, 9, 10, 15, 20, 25, 50, 100, 200, 500, or more base pairs from the first or last nucleotide of a target sequence.

[0212] A vector that encodes a CRISPR enzyme that is mutated to with respect, to a corresponding wild-type enzyme such that the mutated CRISPR enzyme lacks the ability to cleave one or both strands of a target polynucleotide containing a target sequence can be used. A Cas protein (e.g., Cas9, Cas12) or a Cas domain (e.g., Cas9, Cas12) can refer to a polypeptide or domain with at least or at least about 50%, 60%, 70%, 80%, 90%, 91%, 92%, 93%, 94%, 95%, 96%, 97%, 98%, 99%, or 100% sequence identity and/or sequence homology to a wild-type exemplary Cas polypeptide or Cas domain. Cas (e.g., Cas9, Cas12) can refer to the wild-type or a modified form of the Cas protein that can comprise an amino acid change such as a deletion, insertion, substitution, variant, mutation, fusion, chimera, or any combination thereof.

[0213] In some embodiments, a CRISPR protein-derived domain of a base editor can include all or a portion of Cas9 from Corynebacterium ulcerans (NCBI Refs: NC_015683.1, NC_017317.1); Corynebacterium diphtheria (NCBI Refs: NC_016782.1, NC_016786.1); Spiroplasma syrphidicola (NCBI Ref: NC_021284.1); Prevotella intermedia (NCBI Ref: NC_017861.1); Spiroplasma taiwanense (NCBI Ref: NC_021846.1); Streptococcus iniae (NCBI Ref: NC_021314.1); Belliella baltica (NCBI Ref: NC_018010.1); Psychroflexus torquis (NCBI Ref: NC_018721.1); Streptococcus thermophilus (NCBI Ref: YP_820832.1); Listeria innocua (NCBI Ref: NP_472073.1); Campylobacter jejuni (NCBI Ref: YP_002344900.1); Neisseria meningitidis (NCBI Ref: YP_002342100.1), Streptococcus pyogenes, or Staphylococcus aureus.

[0214] Cas9 nuclease sequences and structures are well known to those of skill in the art (See, e.g., “Complete genome sequence of an Ml strain of Streptococcus pyogenes.” Ferretti et al., Proc. Natl. Acad. Sci. U.S.A. 98:4658-4663(2001); “CRISPR RNA maturation by trans-encoded small RNA and host factor RNase III.” Deltcheva E., et al., Nature 471:602-607(2011); and “A programmable dual-RNA-guided DNA endonuclease in adaptive bacterial immunity.” Jinek M., et al., Science 337:816-821(2012), the entire contents of each of which are incorporated herein by reference). Cas9 orthologs have been described in various species, including, but not limited to, S. pyogenes and S. thermophilus. Additional suitable Cas9 nucleases and sequences will be apparent to those of skill in the art based on this disclosure, and such Cas9 nucleases and sequences include Cas9 sequences from the organisms and loci disclosed in Chylinski, Rhun, and Charpentier, “The tracrRNA and Cas9 families of type II CRISPR-Cas immunity systems” (2013) RNA Biology 10:5, 726-737; the entire contents of which are incorporated herein by reference.

[0215] In some embodiments, the gRNA scaffold sequence is as follows:

(SEQ ID NO: 317)
GUUUUAGAGCUAGAAAUAGCAAGUUAAAAUAAGGCUAGUCCGUUAUCAAC
UUGAAAAAGUGGCACCGAGUCGGUGCUUUU

[0216] In an embodiment, the RNA scaffold comprises a stem loop. In an embodiment, the RNA scaffold comprises the nucleic acid sequence:

(SEQ ID NO: 389)
GUUUUUGUACUCUCAAGAUUUAAGUAACUGUACAACGAAACUUACACAGU
UACUUAAAUCUUGCAGAAGCUACAAAGAUAAGGCUUCAUGCCGAAAUCAA
CACCCUGUCAUUUUAUGGCAGGGUG.

[0217] In an embodiment, the RNA scaffold comprises a canonical stem loop. In an embodiment, the RNA scaffold comprises the nucleic acid sequence:

(SEQ ID NO: 324)
GUUUUAGAGCUAGAAAUAGCAAGUUAAAAUAAGGCUAGUCCGUUAUCAAC
UUGAAAAAGUGGCACCGAGUCGGUGCU*mU*mU*mU

where m=2′-O-methyl modification and *=3′ phosphorothioate internucleotide linkages (i.e., at the first 3′ terminal RNA residues as shown here).

[0218] In an embodiment, the RNA scaffold comprises the nucleic acid sequence:

(SEQ ID NO: 390)
GUUUUAGAGCUAGAAAUAGCAAGUUAAAAUAAGGCUAGUCCGUUAUCAAC
UUGAAAAAGUGGCACCGAGUCGGUGCUUUU

[0219] In an embodiment, an S. pyogenes sgRNA scaffold polynucleotide sequence is as follows:

(SEQ ID NO: 319)
GUUUUAGAGCUAGAAAUAGCAAGUUAAAAUAAGGCUAGUCCGUUAUCAAC
UUGAAAAAGUGGCACCGAGUCGGUGC

[0220] In an embodiment, an S. aureus sgRNA scaffold polynucleotide sequence is as follows:

(SEQ ID NO: 320)
GUUUUAGUACUCUGUAAUGAAAAUUACAGAAUCUACUAAAACAAGGCAAA
AUGCCGUGUUUAUCUCGUCAACUUGUUGGCGAGA

[0221] In an embodiment, the RNA scaffold comprises a non-canonical sequence. In an embodiment, the RNA scaffold comprises the nucleic acid sequence:

(SEQ ID NO: 323)
GUUUUAGAGCUAGAAAUAGCAAGUUAAAAUAAGGCUAGUCCGUUAUCAAC
UUGAAAAAGUGGGACCGAGUCGGUGCU*mU*mU*mU

where m=2′-O-methyl modification and *=3′ phosphorothioate internucleotide linkages (i.e., at the first 3′ terminal RNA residues as shown here).

[0222] In some embodiments, wild-type Cas9 corresponds to Cas9 from Streptococcus pyogenes (NCBI Reference Sequence: NC_017053.1). An exemplary Streptococcus pyogenes Cas9 (spCas9) nucleic acid sequence is provided below:

(SEQ ID NO: 198)
ATGGATAAGAAATACTCAATAGGCTTAGATATCGGCACAAATAGCGTCGGATGGGCGGTGAT
CACTGATGATTATAAGGTTCCGTCTAAAAAGTTCAAGGTTCTGGGAAATACAGACCGCCACA
GTATCAAAAAAAATCTTATAGGGGCTCTTTTATTTGGCAGTGGAGAGACAGCGGAAGCGACT
CGTCTCAAACGGACAGCTCGTAGAAGGTATACACGTCGGAAGAATCGTATTTGTTATCTACA
GGAGATTTTTTCAAATGAGATGGCGAAAGTAGATGATAGTTTCTTTCATCGACTTGAAGAGT
CTTTTTTGGTGGAAGAAGACAAGAAGCATGAACGTCATCCTATTTTTGGAAATATAGTAGAT
GAAGTTGCTTATCATGAGAAATATCCAACTATCTATCATCTGCGAAAAAAATTGGCAGATTC
TACTGATAAAGCGGATTTGCGCTTAATCTATTTGGCCTTAGCGCATATGATTAAGTTTCGTG
GTCATTTTTTGATTGAGGGAGATTTAAATCCTGATAATAGTGATGTGGACAAACTATTTATC
CAGTTGGTACAAATCTACAATCAATTATTTGAAGAAAACCCTATTAACGCAAGTAGAGTAGA
TGCTAAAGCGATTCTTTCTGCACGATTGAGTAAATCAAGACGATTAGAAAATCTCATTGCTC
AGCTCCCCGGTGAGAAGAGAAATGGCTTGTTTGGGAATCTCATTGCTTTGTCATTGGGATTG
ACCCCTAATTTTAAATCAAATTTTGATTTGGCAGAAGATGCTAAATTACAGCTTTCAAAAGA
TACTTACGATGATGATTTAGATAATTTATTGGCGCAAATTGGAGATCAATATGCTGATTTGT
TTTTGGCAGCTAAGAATTTATCAGATGCTATTTTACTTTCAGATATCCTAAGAGTAAATAGT
GAAATAACTAAGGCTCCCCTATCAGCTTCAATGATTAAGCGCTACGATGAACATCATCAAGA
CTTGACTCTTTTAAAAGCTTTAGTTCGACAACAACTTCCAGAAAAGTATAAAGAAATCTTTT
TTGATCAATCAAAAAACGGATATGCAGGTTATATTGATGGGGGAGCTAGCCAAGAAGAATTT
TATAAATTTATCAAACCAATTTTAGAAAAAATGGATGGTACTGAGGAATTATTGGTGAAACT
AAATCGTGAAGATTTGCTGCGCAAGCAACGGACCTTTGACAACGGCTCTATTCCCCATCAAA
TTCACTTGGGTGAGCTGCATGCTATTTTGAGAAGACAAGAAGACTTTTATCCATTTTTAAAA
GACAATCGTGAGAAGATTGAAAAAATCTTGACTTTTCGAATTCCTTATTATGTTGGTCCATT
GGCGCGTGGCAATAGTCGTTTTGCATGGATGACTCGGAAGTCTGAAGAAACAATTACCCCAT
GGAATTTTGAAGAAGTTGTCGATAAAGGTGCTTCAGCTCAATCATTTATTGAACGCATGACA
AACTTTGATAAAAATCTTCCAAATGAAAAAGTACTACCAAAACATAGTTTGCTTTATGAGTA
TTTTACGGTTTATAACGAATTGACAAAGGTCAAATATGTTACTGAGGGAATGCGAAAACCAG
CATTTCTTTCAGGTGAACAGAAGAAAGCCATTGTTGATTTACTCTTCAAAACAAATCGAAAA
GTAACCGTTAAGCAATTAAAAGAAGATTATTTCAAAAAAATAGAATGTTTTGATAGTGTTGA
AATTTCAGGAGTTGAAGATAGATTTAATGCTTCATTAGGCGCCTACCATGATTTGCTAAAAA
TTATTAAAGATAAAGATTTTTTGGATAATGAAGAAAATGAAGATATCTTAGAGGATATTGTT
TTAACATTGACCTTATTTGAAGATAGGGGGATGATTGAGGAAAGACTTAAAACATATGCTCA
CCTCTTTGATGATAAGGTGATGAAACAGCTTAAACGTCGCCGTTATACTGGTTGGGGACGTT
TGTCTCGAAAATTGATTAATGGTATTAGGGATAAGCAATCTGGCAAAACAATATTAGATTTT
TTGAAATCAGATGGTTTTGCCAATCGCAATTTTATGCAGCTGATCCATGATGATAGTTTGAC
ATTTAAAGAAGATATTCAAAAAGCACAGGTGTCTGGACAAGGCCATAGTTTACATGAACAGA
TTGCTAACTTAGCTGGCAGTCCTGCTATTAAAAAAGGTATTTTACAGACTGTAAAAATTGTT
GATGAACTGGTCAAAGTAATGGGGCATAAGCCAGAAAATATCGTTATTGAAATGGCACGTGA
AAATCAGACAACTCAAAAGGGCCAGAAAAATTCGCGAGAGCGTATGAAACGAATCGAAGAAG
GTATCAAAGAATTAGGAAGTCAGATTCTTAAAGAGCATCCTGTTGAAAATACTCAATTGCAA
AATGAAAAGCTCTATCTCTATTATCTACAAAATGGAAGAGACATGTATGTGGACCAAGAATT
AGATATTAATCGTTTAAGTGATTATGATGTCGATCACATTGTTCCACAAAGTTTCATTAAAG
ACGATTCAATAGACAATAAGGTACTAACGCGTTCTGATAAAAATCGTGGTAAATCGGATAAC
GTTCCAAGTGAAGAAGTAGTCAAAAAGATGAAAAACTATTGGAGACAACTTCTAAACGCCAA
GTTAATCACTCAACGTAAGTTTGATAATTTAACGAAAGCTGAACGTGGAGGTTTGAGTGAAC
TTGATAAAGCTGGTTTTATCAAACGCCAATTGGTTGAAACTCGCCAAATCACTAAGCATGTG
GCACAAATTTTGGATAGTCGCATGAATACTAAATACGATGAAAATGATAAACTTATTCGAGA
GGTTAAAGTGATTACCTTAAAATCTAAATTAGTTTCTGACTTCCGAAAAGATTTCCAATTCT
ATAAAGTACGTGAGATTAACAATTACCATCATGCCCATGATGCGTATCTAAATGCCGTCGTT
GGAACTGCTTTGATTAAGAAATATCCAAAACTTGAATCGGAGTTTGTCTATGGTGATTATAA
AGTTTATGATGTTCGTAAAATGATTGCTAAGTCTGAGCAAGAAATAGGCAAAGCAACCGCAA
AATATTTCTTTTACTCTAATATCATGAACTTCTTCAAAACAGAAATTACACTTGCAAATGGA
GAGATTCGCAAACGCCCTCTAATCGAAACTAATGGGGAAACTGGAGAAATTGTCTGGGATAA
AGGGCGAGATTTTGCCACAGTGCGCAAAGTATTGTCCATGCCCCAAGTCAATATTGTCAAGA
AAACAGAAGTACAGACAGGCGGATTCTCCAAGGAGTCAATTTTACCAAAAAGAAATTCGGAC
AAGCTTATTGCTCGTAAAAAAGACTGGGATCCAAAAAAATATGGTGGTTTTGATAGTCCAAC
GGTAGCTTATTCAGTCCTAGTGGTTGCTAAGGTGGAAAAAGGGAAATCGAAGAAGTTAAAAT
CCGTTAAAGAGTTACTAGGGATCACAATTATGGAAAGAAGTTCCTTTGAAAAAAATCCGATT
GACTTTTTAGAAGCTAAAGGATATAAGGAAGTTAAAAAAGACTTAATCATTAAACTACCTAA
ATATAGTCTTTTTGAGTTAGAAAACGGTCGTAAACGGATGCTGGCTAGTGCCGGAGAATTAC
AAAAAGGAAATGAGCTGGCTCTGCCAAGCAAATATGTGAATTTTTTATATTTAGCTAGTCAT
TATGAAAAGTTGAAGGGTAGTCCAGAAGATAACGAACAAAAACAATTGTTTGTGGAGCAGCA
TAAGCATTATTTAGATGAGATTATTGAGCAAATCAGTGAATTTTCTAAGCGTGTTATTTTAG
CAGATGCCAATTTAGATAAAGTTCTTAGTGCATATAACAAACATAGAGACAAACCAATACGT
GAACAAGCAGAAAATATTATTCATTTATTTACGTTGACGAATCTTGGAGCTCCCGCTGCTTT
TAAATATTTTGATACAACAATTGATCGTAAACGATATACGTCTACAAAAGAAGTTTTAGATG
CCACTCTTATCCATCAATCCATCACTGGTCTTTATGAAACACGCATTGATTTGAGTCAGCTA
GGAGGTGACTGA.

[0223] An exemplary Streptococcus pyogenes Cas9 (spCas9) amino acid sequence is provided below:

(SEQ ID NO: 199)
MDKKYSIGLDIGTNSVGWAVITDDYKVPSKKFKVLGNTDRHSIKKNLIGA
LLFGSGETAEATRLKRTARRRYTRRKNRICYLQEIFSNEMAKVDDSFFHR
LEESFLVEEDKKHERHPIFGNIVDEVAYHEKYPTIYHLRKKLADSTDKAD
LRLIYLALAHMIKFRGHFLIEGDLNPDNSDVDKLFIQLVQIYNQLFEENP
INASRVDAKAILSARLSKSRRLENLIAQLPGEKRNGLFGNLIALSLGLTP
NFKSNFDLAEDAKLQLSKDTYDDDLDNLLAQIGDQYADLFLAAKNLSDAI
LLSDILRVNSEITKAPLSASMIKRYDEHHQDLTLLKALVROQLPEKYKEI
FFDQSKNGYAGYIDGGASQEEFYKFIKPILEKMDGTEELLVKLNREDLLR
KQRTFDNGSIPHQIHLGELHAILRRQEDFYPFLKDNREKIEKILTFRIPY
YVGPLARGNSRFAWMTRKSEETITPWNFEEVVDKGASAQSFIERMTNFDK
NLPNEKVLPKHSLLYEYFTVYNELTKVKYVTEGMRKPAFLSGEQKKAIVD
LLFKTNRKVTVKQLKEDYFKKIECFDSVEISGVEDRFNASLGAYHDLLKI
IKDKDFLDNEENEDILEDIVLTLTLFEDRGMIEERLKTYAHLFDDKVMKQ
LKRRRYTGWGRLSRKLINGIRDKQSGKTILDFLKSDGFANRNFMQLIHDD
SLTFKEDIQKAQVSGQGHSLHEQIANLAGSPAIKKGILQTVKIVDELVKV
MGHKPENIVIEMARENQTTQKGQKNSRERMKRIEEGIKELGSQILKEHPV
ENTQLQNEKLYLYYLQNGRDMYVDQELDINRLSDYDVDHIVPQSFIKDDS
IDNKVLTRSDKNRGKSDNVPSEEVVKKMKNYWRQLLNAKLITQRKFDNLT
KAERGGLSELDKAGFIKRQLVETRQITKHVAQILDSRMNTKYDENDKLIR
EVKVITLKSKLVSDFRKDFQFYKVREINNYHHAHDAYLNAVVGTALIKKY
PKLESEFVYGDYKVYDVRKMIAKSEQEIGKATAKYFFYSNIMNFFKTEIT
LANGEIRKRPLIETNGETGEIVWDKGRDFATVRKVLSMPQVNIVKKTEVQ
TGGFSKESILPKRNSDKLIARKKDWDPKKYGGFDSPTVAYSVLVVAKVEK
GKSKKLKSVKELLGITIMERSSFEKNPIYEKLKGSPEDNEQKQLFVEQHK
HYLDEIIEQISEFSKRVILADANLDKVLSAYNKHRDKPIREQAENIIHLF
TLTNLGAPAAFKYFDTTIDRKRYTSTKEVLDATLIHQSITGLYETRIDLS
QLGGD

(single underline: HNH domain; double underline: RuvC domain)

[0224] In some embodiments, wild-type Cas9 corresponds to, or comprises the following nucleotide sequences:

(SEQ ID NO: 200)
ATGGATAAAAAGTATTCTATTGGTTTAGACATCGGCACTAATTCCGTTGGATGGGCTGTCAT
AACCGATGAATACAAAGTACCTTCAAAGAAATTTAAGGTGTTGGGGAACACAGACCGTCATT
CGATTAAAAAGAATCTTATCGGTGCCCTCCTATTCGATAGTGGCGAAACGGCAGAGGCGACT
CGCCTGAAACGAACCGCTCGGAGAAGGTATACACGTCGCAAGAACCGAATATGTTACTTACA
AGAAATTTTTAGCAATGAGATGGCCAAAGTTGACGATTCTTTCTTTCACCGTTTGGAAGAGT
CCTTCCTTGTCGAAGAGGACAAGAAACATGAACGGCACCCCATCTTTGGAAACATAGTAGAT
GAGGTGGCATATCATGAAAAGTACCCAACGATTTATCACCTCAGAAAAAAGCTAGTTGACTC
AACTGATAAAGCGGACCTGAGGTTAATCTACTTGGCTCTTGCCCATATGATAAAGTTCCGTG
GGCACTTTCTCATTGAGGGTGATCTAAATCCGGACAACTCGGATGTCGACAAACTGTTCATC
CAGTTAGTACAAACCTATAATCAGTTGITTGAAGAGAACCCTATAAATGCAAGTGGCGTGGA
TGCGAAGGCTATTCTTAGCGCCCGCCTCTCTAAATCCCGACGGCTAGAAAACCTGATCGCAC
AATTACCCGGAGAGAAGAAAAATGGGTTGTTCGGTAACCTTATAGCGCTCTCACTAGGCCTG
ACACCAAATTTTAAGTCGAACTTCGACTTAGCTGAAGATGCCAAATTGCAGCTTAGTAAGGA
CACGTACGATGACGATCTCGACAATCTACTGGCACAAATTGGAGATCAGTATGCGGACTTAT
TTTTGGCTGCCAAAAACCTTAGCGATGCAATCCTCCTATCTGACATACTGAGAGTTAATACT
GAGATTACCAAGGCGCCGTTATCCGCTTCAATGATCAAAAGGTACGATGAACATCACCAAGA
CTTGACACTTCTCAAGGCCCTAGTCCGTCAGCAACTGCCTGAGAAATATAAGGAAATATTCT
TTGATCAGTCGAAAAACGGGTACGCAGGTTATATTGACGGCGGAGCGAGTCAAGAGGAATTC
TACAAGTTTATCAAACCCATATTAGAGAAGATGGATGGGACGGAAGAGTTGCTTGTAAAACT
CAATCGCGAAGATCTACTGCGAAAGCAGCGGACTTTCGACAACGGTAGCATTCCACATCAAA
TCCACTTAGGCGAATTGCATGCTATACTTAGAAGGCAGGAGGATTTTTATCCGTTCCTCAAA
GACAATCGTGAAAAGATTGAGAAAATCCTAACCTTTCGCATACCTTACTATGTGGGACCCCT
GGCCCGAGGGAACTCTCGGTTCGCATGGATGACAAGAAAGTCCGAAGAAACGATTACTCCAT
GGAATTTTGAGGAAGTTGTCGATAAAGGTGCGTCAGCTCAATCGTTCATCGAGAGGATGACC
AACTTTGACAAGAATTTACCGAACGAAAAAGTATTGCCTAAGCACAGTTTACTTTACGAGTA
TTTCACAGTGTACAATGAACTCACGAAAGTTAAGTATGTCACTGAGGGCATGCGTAAACCCG
CCTTTCTAAGCGGAGAACAGAAGAAAGCAATAGTAGATCTGTTATTCAAGACCAACCGCAAA
GTGACAGTTAAGCAATTGAAAGAGGACTACTTTAAGAAAATTGAATGCTTCGATTCTGTCGA
GATCTCCGGGGTAGAAGATCGATTTAATGCGTCACTTGGTACGTATCATGACCTCCTAAAGA
TAATTAAAGATAAGGACTTCCTGGATAACGAAGAGAATGAAGATATCTTAGAAGATATAGTG
TTGACTCTTACCCTCTTTGAAGATCGGGAAATGATTGAGGAAAGACTAAAAACATACGCTCA
CCTGTTCGACGATAAGGTTATGAAACAGTTAAAGAGGCGTCGCTATACGGGCTGGGGACGAT
TGTCGCGGAAACTTATCAACGGGATAAGAGACAAGCAAAGTGGTAAAACTATTCTCGATTTT
CTAAAGAGCGACGGCTTCGCCAATAGGAACTTTATGCAGCTGATCCATGATGACTCTTTAAC
CTTCAAAGAGGATATACAAAAGGCACAGGTTTCCGGACAAGGGGACTCATTGCACGAACATA
TTGCGAATCTTGCTGGTTCGCCAGCCATCAAAAAGGGCATACTCCAGACAGTCAAAGTAGTG
GATGAGCTAGTTAAGGTCATGGGACGTCACAAACCGGAAAACATTGTAATCGAGATGGCACG
CGAAAATCAAACGACTCAGAAGGGGCAAAAAAACAGTCGAGAGCGGATGAAGAGAATAGAAG
AGGGTATTAAAGAACTGGGCAGCCAGATCTTAAAGGAGCATCCTGTGGAAAATACCCAATTG
CAGAACGAGAAACTTTACCTCTATTACCTACAAAATGGAAGGGACATGTATGTTGATCAGGA
ACTGGACATAAACCGTTTATCTGATTACGACGTCGATCACATTGTACCCCAATCCTTTTTGA
AGGACGATTCAATCGACAATAAAGTGCTTACACGCTCGGATAAGAACCGAGGGAAAAGTGAC
AATGTTCCAAGCGAGGAAGTCGTAAAGAAAATGAAGAACTATTGGCGGCAGCTCCTAAATGC
GAAACTGATAACGCAAAGAAAGTTCGATAACTTAACTAAAGCTGAGAGGGGTGGCTTGTCTG
AACTTGACAAGGCCGGATTTATTAAACGTCAGCTCGTGGAAACCCGCCAAATCACAAAGCAT
GTTGCACAGATACTAGATTCCCGAATGAATACGAAATACGACGAGAACGATAAGCTGATTCG
GGAAGTCAAAGTAATCACTTTAAAGTCAAAATTGGTGTCGGACTTCAGAAAGGATTTTCAAT
TCTATAAAGTTAGGGAGATAAATAACTACCACCATGCGCACGACGCTTATCTTAATGCCGTC
GTAGGGACCGCACTCATTAAGAAATACCCGAAGCTAGAAAGTGAGTTTGTGTATGGTGATTA
CAAAGTTTATGACGTCCGTAAGATGATCGCGAAAAGCGAACAGGAGATAGGCAAGGCTACAG
CCAAATACTTCTTTTATTCTAACATTATGAATTTCTTTAAGACGGAAATCACTCTGGCAAAC
GGAGAGATACGCAAACGACCTTTAATTGAAACCAATGGGGAGACAGGTGAAATCGTATGGGA
TAAGGGCCGGGACTTCGCGACGGTGAGAAAAGTTTTGTCCATGCCCCAAGTCAACATAGTAA
AGAAAACTGAGGTGCAGACCGGAGGGTTTTCAAAGGAATCGATTCTTCCAAAAAGGAATAGT
GATAAGCTCATCGCTCGTAAAAAGGACTGGGACCCGAAAAAGTACGGTGGCTTCGATAGCCC
TACAGTTGCCTATTCTGTCCTAGTAGTGGCAAAAGTTGAGAAGGGAAAATCCAAGAAACTGA
AGTCAGTCAAAGAATTATTGGGGATAACGATTATGGAGCGCTCGTCTTTTGAAAAGAACCCC
ATCGACTTCCTTGAGGCGAAAGGTTACAAGGAAGTAAAAAAGGATCTCATAATTAAACTACC
AAAGTATAGTCTGTTTGAGTTAGAAAATGGCCGAAAACGGATGTTGGCTAGCGCCGGAGAGC
TTCAAAAGGGGAACGAACTCGCACTACCGTCTAAATACGTGAATTTCCTGTATTTAGCGTCC
CATTACGAGAAGTTGAAAGGTTCACCTGAAGATAACGAACAGAAGCAACTTTTTGTTGAGCA
GCACAAACATTATCTCGACGAAATCATAGAGCAAATTTCGGAATTCAGTAAGAGAGTCATCC
TAGCTGATGCCAATCTGGACAAAGTATTAAGCGCATACAACAAGCACAGGGATAAACCCATA
CGTGAGCAGGCGGAAAATATTATCCATTTGTTTACTCTTACCAACCTCGGCGCTCCAGCCGC
ATTCAAGTATTTTGACACAACGATAGATCGCAAACGATACACTTCTACCAAGGAGGTGCTAG
ACGCGACACTGATTCACCAATCCATCACGGGATTATATGAAACTCGGATAGATTTGTCACAG
CTTGGGGGTGACGGATCCCCCAAGAAGAAGAGGAAAGTCTCGAGCGACTACAAAGACCATGA
CGGTGATTATAAAGATCATGACATCGATTACAAGGATGACGATGACAAGGCTGCAGGA

[0225] In some embodiments, wild-type Cas9 corresponds to, or comprises the following amino acid sequence:

(SEQ ID NO: 201)
MDKKYSIGLAIGTNSVGWAVITDEYKVPSKKFKVLGNTDRHSIKKNLIGA
LLFDSGETAEATRLKRTARRRYTRRKNRICYLQEIFSNEMAKVDDSFFHR
LEESFLVEEDKKHERHPIFGNIVDEVAYHEKYPTIYHLRKKLVDSTDKAD
LRLIYLALAHMIKFRGHFLIEGDLNPDNSDVDKLFIQLVQTYNQLFEENP
INASGVDAKAILSARLSKSRRLENLIAQLPGEKKNGLFGNLIALSLGLTP
NFKSNFDLAEDAKLQLSKDTYDDDLDNLLAQIGDQYADLFLAAKNLSDAI
LLSDILRVNTEITKAPLSASMIKRYDEHHQDLTLLKALVRQQLPEKYKEI
FFDQSKNGYAGYIDGGASQEEFYKFIKPILEKMDGTEELLVKLNREDLLR
KQRTFDNGSIPHQIHLGELHAILRRQEDFYPFLKDNREKIEKILTFRIPY
YVGPLARGNSRFAWMTRKSEETITPWNFEEVVDKGASAQSFIERMTNFDK
NLPNEKVLPKHSLLYEYFTVYNELTKVKYVTEGMRKPAFLSGEQKKAIVD
LLFKTNRKVTVKQLKEDYFKKIECFDSVEISGVEDRFNASLGTYHDLLKI
IKDKDFLDNEENEDILEDIVLTLTLFEDREMIEERLKTYAHLFDDKVMKQ
LKRRRYTGWGRLSRKLINGIRDKQSGKTILDFLKSDGFANRNFMQLIHDD
SLTFKEDIQKAQVSGQGDSLHEHIANLAGSPAIKKGILQYVKVVDELVKV
MGRHKPENIVIEMARENQTTQKGQKNSRERMKRIEEGIKELGSQILKEHP
VENTQLQNEKLYLYYLQNGRDMYVDQELDINRLSDYDVDHIVPQSFLKDD
SIDNKVLTRSDKNRGKSDNVPSEEVVKKMKNYWRQLLNAKLITQRKFDNL
TKAERGGLSELDKAGFIKRQLVETRQITKHVAQILDSRMNTKYDENDKLI
REVKVITLKSKLVSDFRKDFQFYKVREINNYHHAHDAYLNAYVGTALIKK
YPKLESEFVYGDYKVYDVRKMIAKSEQEIGKATAKYFFYSNIMNFFKTEI
TLANGEIRKRPLIETNGETGEIVWDKGRDFATVRKVLSMPQVNIVKKTEV
QTGGFSKESILPKRNSDKLIARKKDWDPKKYGGFDSPTVAYSVLVVAKVE
KGKSKKLKSVKELLGITIMERSSFEKNPIDFLEAKGYKEVKKDLIIKLPK
YSLFELENGRKRMLASAGELQKGNELALPSKYVNFLYLASHYEKLKGSPE
DNEQKQLFVEQHKHYLDEIIEQISEFSKRVILADANLDKVLSAYNKHRDK
PIREQAENIIHLFTLTNLGAPAAFKYFDTTIDRKRYTSTKEVLDATLIHQ
SITGLYETRIDLSQLGGD.

(single underline: HNH domain; double underline: RuvC domain).

[0226] In some embodiments, wild-type Cas9 corresponds to Cas9 from Streptococcus pyogenes (NCBI Reference Sequence: NC_002737.2. In some embodiments, wild-type Cas9 corresponds to Cas9 from Streptococcus pyogenes (Uniprot Reference Sequence: Q99ZW2).

[0227] The amino acid sequence of an exemplary catalytically inactive Cas9 (dCas9) is as follows:

(SEQ ID NO: 203)
MDKKYSIGLAIGTNSVGWAVITDEYKVPSKKFKVLGNTDRHSIKKNLIGA
LLFDSGETAEATRLKRTARRRYTRRKNRICYLQEIFSNEMAKVDDSFFHR
LEESFLVEEDKKHERHPIFGNIVDEVAYHEKYPTIYHLRKKLVDSTDKAD
LRLIYLALAHMIKFRGHFLIEGDLNPDNSDVDKLFIQLVQTYNQLFEENP
INASGVDAKAILSARLSKSRRLENLIAQLPGEKKNGLFGNLIALSLGLTP
NFKSNFDLAEDAKLQLSKDTYDDDLDNLLAQIGDQYADLFLAAKNLSDAI
LLSDILRVNTEITKAPLSASMIKRYDEHHQDLTLLKALVRQQLPEKYKEI
FFDQSKNGYAGYIDGGASQEEFYKFIKPILEKMDGTEELLVKLNREDLLR
KQRTFDNGSIPHQIHLGELHAILRRQEDFYPFLKDNREKIEKILTFRIPY
YVGPLARGNSRFAWMTRKSEETITPWNFEEVVDKGASAQSFIERMTNFDK
NLPNEKVLPKHSLLYEYFTVYNELTKVKYVTEGMRKPAFLSGEQKKAIVD
LLFKTNRKVTVKQLKEDYFKKIECFDSVEISGVEDRFNASLGTYHDLLKI
IKDKDFLDNEENEDILEDIVLTLTLFEDREMIEERLKTYAHLFDDKVMKQ
LKRRRYTGWGRLSRKLINGIRDKQSGKTILDFLKSDGFANRNFMQLIHDD
SLTFKEDIQKAQVSGQGDSLHEHIANLAGSPAIKKGILQTVKVVQNEKLY
LYYLQNGRDMYVDQELDINRLSDYDVDAIVPQSFLKDDSIDNKVLTRSDK
NRGKSDNVPSEEVVKKMKNYWRQLLNAKLITQRKFDNLTKAERGGLSELD
KAGFIKRQLVETRQITKHVAQILDSRMNTKYDENDKLIREVKVITLKSKL
VSDFRKDFQFYKVREINNYHHAHDAYLNAVVGTALIKKYPKLESEFVYGD
YKVYDVRKMIAKSEQEIGKATAKYFFYSNIMNFFKTEITLANGEIRKRPL
IETNGETGEIVWDKGRDFATVRKVLSMPQVNIVKKTEVQTGGFSKESILP
KRNSDKLIARKKDWDPKKYGGFDSPTVAYSVLVVAKVEKGKSKKLKSVKE
LLGITIMERSSFEKNPIDFLEAKGYKEVKKDLIIKLPKYSLFELENGRKR
MLASAGELQKGNELALPSKYVNFLYLASHYEKLKGSPEDNEQKQLFVEQH
KHYLDEIIEQISEFSKRVILADANLDKVLSAYNKHRDKPIREQAENIIHL
FTLTNLGAPAAFKYFDTTIDRKRYTSTKEVLDATLIHQSITGLYETRIDL
SQLGGD

(see, e.g., Qi et al., “Repurposing CRISPR as an RNA-guided platform for sequence-specific control of gene expression.” Cell. 2013; 152(5):1173-83, the entire contents of which are incorporated herein by reference).

[0228] In some embodiments, a Cas9 nuclease has an inactive (e.g., an inactivated) DNA cleavage domain, that is, the Cas9 is a nickase, referred to as an “nCas9” protein (for “nickase” Cas9). A nuclease-inactivated Cas9 protein may interchangeably be referred to as a “dCas9” protein (for nuclease-“dead” Cas9) or catalytically inactive Cas9. Methods for generating a Cas9 protein (or a fragment thereof) having an inactive DNA cleavage domain are known (See, e.g., Jinek et al., Science. 337:816-821(2012); Qi et al., “Repurposing CRISPR as an RNA-Guided Platform for Sequence-Specific Control of Gene Expression” (2013) Cell. 28; 152(5):1173-83, the entire contents of each of which are incorporated herein by reference). For example, the DNA cleavage domain of Cas9 is known to include two subdomains, the HNH nuclease subdomain and the RuvC1 subdomain. The HNH subdomain cleaves the strand complementary to the gRNA, whereas the RuvC1 subdomain cleaves the non-complementary strand. Mutations within these subdomains can silence the nuclease activity of Cas9. For example, the mutations D10A and H840A completely inactivate the nuclease activity of S. pyogenes Cas9 (Jinek et al., Science. 337:816-821(2012); Qi et al., Cell. 28; 152(5):1173-83 (2013)).

[0229] Additional suitable nuclease-inactive dCas9 domains will be apparent to those of skill in the art based on this disclosure and knowledge in the field, and are within the scope of this disclosure. Such additional exemplary suitable nuclease-inactive Cas9 domains include, but are not limited to, D10A/H840A, D10A/D839A/H840A, and D10A/D839A/H840A/N863A mutant domains (See, e.g., Prashant et al., CAS9 transcriptional activators for target specificity screening and paired nickases for cooperative genome engineering. Nature Biotechnology. 2013; 31(9): 833-838, the entire contents of which are incorporated herein by reference).

[0230] In some embodiments, a Cas9 nuclease has an inactive (e.g., an inactivated) DNA cleavage domain, that is, the Cas9 is a nickase, referred to as an “nCas9” protein (for “nickase” Cas9). The Cas9 nickase may be a Cas9 protein that is capable of cleaving only one strand of a duplexed nucleic acid molecule (e.g., a duplexed DNA molecule). In some embodiments the Cas9 nickase cleaves the target strand of a duplexed nucleic acid molecule, meaning that the Cas9 nickase cleaves the strand that is base paired to (complementary to) a gRNA (e.g., an sgRNA) that is bound to the Cas9. In some embodiments, a Cas9 nickase comprises a D10A mutation and has a histidine at position 840.

[0231] The amino acid sequence of an exemplary catalytically Cas9 nickase (nCas9) is as follows:

(SEQ ID NO: 233)
MDKKYSIGLAIGTNSVGWAVITDEYKVPSKKFKVLGNTDRHSIKKNLIGA
LLFDSGETAEATRLKRTARRRYTRRKNRICYLQEIFSNEMAKVDDSFFHR
LEESFLVEEDKKHERHPIFGNIVDEVAYHEKYPTIYHLRKKLVDSTDKAD
LRLIYLALAHMIKFRGHFLIEGDLNPDNSDVDKLFIQLVQTYNQLFEENP
INASGVDAKAILSARLSKSRRLENLIAQLPGEKKNGLFGNLIALSLGLTP
NFKSNFDLAEDAKLQLSKDTYDDDLDNLLAQIGDQYADLFLAAKNLSDAI
LLSDILRVNTEITKAPLSASMIKRYDEHHQDLTLLKALVROQLPEKYKEI
FFDQSKNGYAGYIDGGASQEEFYKFIKPILEKMDGTEELLVKLNREDLLR
KQRTFDNGSIPHQIHLGELHAILRRQEDFYPFLKDNREKIEKILTFRIPY
YVGPLARGNSRFAWMTRKSEETITPWNFEEVVDKGASAQSFIERMTNFDK
NLPNEKVLPKHSLLYEYFTVYNELTKVKYVTEGMRKPAFLSGEQKKAIVD
LLFKTNRKVTVKQLKEDYFKKIECFDSVEISGVEDRFNASLGTYHDLLKI
IKDKDFLDNEENEDILEDIVLTLTLFEDREMIEERLKTYAHLFDDKVMKQ
LKRRRYTGWGRLSRKLINGIRDKQSGKTILDFLKSDGFANRNFMQLIHDD
SLTFKEDIQKAQVSGQGDSLHEHIANLAGSPAIKKGILQTVKVVDELVKV
MGRHKPENIVIEMARENQTTQKGQKNSRERMKRIEEGIKELGSQILKEHP
VENTQLQNEKLYLYYLQNGRDMYVDQELDINRLSDYDVDHIVPQSFLKDD
SIDNKVLTRSDKNRGKSDNVPSEEVVKKMKNYWRQLLNAKLITQRKFDNL
TKAERGGLSELDKAGFIKRQLVETRQITKHVAQILDSRMNTKYDENDKLI
REVKVITLKSKLVSDFRKDFQFYKVREINNYHHAHDAYLNAVVGTALIKK
YPKLESEFVYGDYKVYDVRKMIAKSEQEIGKATAKYFFYSNIMNFFKTEI
TLANGEIRKRPLIETNGETGEIVWDKGRDFATVRKVLSMPQVNIVKKTEV
QTGGFSKESILPKRNSDKLIARKKDWDPKKYGGFDSPTVAYSVLVVAKVE
KGKSKKLKSVKELLGITIMERSSFEKNPIDFLEAKGYKEVKKDLIIKLPK
YSLFELENGRKRMLASAGELQKGNELALPSKYVNFLYLASHYEKLKGSPE
DNEQKQLFVEQHKHYLDEIIEQISEFSKRVILADANLDKVLSAYNKHRDK
PIREQAENIIHLFTLTNLGAPAAFKYFDTTIDRKRYTSTKEVLDATLIHQ
SITGLYETRIDLSQLGGD.

[0232] In some embodiments, Cas9 is a variant Cas9 protein. A variant Cas9 polypeptide has an amino acid sequence that is different by one amino acid (e.g., has a deletion, insertion, substitution, fusion) when compared to the amino acid sequence of a wild-type Cas9 protein. In some instances, the variant Cas9 polypeptide has an amino acid change (e.g., deletion, insertion, or substitution) that reduces the nuclease activity of the Cas9 polypeptide. For example, in some instances, the variant Cas9 polypeptide has less than 50%, less than 40%, less than 30%, less than 20%, less than 10%, less than 5%, or less than 1% of the nuclease activity of the corresponding wild-type Cas9 protein. In some embodiments, the variant Cas9 protein has no substantial nuclease activity.

[0233] In some embodiments the Cas9 nickase cleaves the non-target, non-base-edited strand of a duplexed nucleic acid molecule, meaning that the Cas9 nickase cleaves the strand that is not base paired to a gRNA (e.g., an sgRNA) that is bound to the Cas9. In some embodiments, a Cas9 nickase comprises an H840A mutation and has an aspartic acid residue at position 10, or a corresponding mutation. In some embodiments the Cas9 nickase comprises an amino acid sequence that is at least 60%, at least 65%, at least 70%, at least 75%, at least 80%, at least 85%, at least 90%, at least 95%, at least 96%, at least 97%, at least 98%, at least 99%, or at least 99.5% identical to any one of the Cas9 nickases provided herein. Additional suitable Cas9 nickases will be apparent to those of skill in the art based on this disclosure and knowledge in the field, and are within the scope of this disclosure.

[0234] In some embodiments, Cas9 is a modified Cas9. A given gRNA targeting sequence can have additional sites throughout the genome where partial homology exists. These sites are called off-targets and need to be considered when designing a gRNA. In addition to optimizing gRNA design, CRISPR specificity can also be increased through modifications to Cas9. Cas9 generates double-strand breaks (DSBs) through the combined activity of two nuclease domains, RuvC and HNH. Cas9 nickase, a D10A mutant of SpCas9, retains one nuclease domain and generates a DNA nick rather than a DSB. The nickase system can also be combined with HDR-mediated gene editing for specific gene edits.

### Catalytically Dead Nucleases

[0235] Also provided herein are base editors comprising a polynucleotide programmable nucleotide binding domain which is catalytically dead (i.e., incapable of cleaving a target polynucleotide sequence). Herein the terms “catalytically dead” and “nuclease dead” are used interchangeably to refer to a polynucleotide programmable nucleotide binding domain which has one or more mutations and/or deletions resulting in its inability to cleave a strand of a nucleic acid. In some embodiments, a catalytically dead polynucleotide programmable nucleotide binding domain base editor can lack nuclease activity as a result of specific point mutations in one or more nuclease domains. For example, in the case of a base editor comprising a Cas9 domain, the Cas9 can comprise both a D10A mutation and an H840A mutation. Such mutations inactivate both nuclease domains, thereby resulting in the loss of nuclease activity. In other embodiments, a catalytically dead polynucleotide programmable nucleotide binding domain can comprise one or more deletions of all or a portion of a catalytic domain (e.g., RuvC1 and/or HNH domains). In further embodiments, a catalytically dead polynucleotide programmable nucleotide binding domain comprises a point mutation (e.g., D10A or H840A) as well as a deletion of all or a portion of a nuclease domain. dCas9 domains are known in the art and described, for example, in Qi et al., “Repurposing CRISPR as an RNA-guided platform for sequence-specific control of gene expression.” Cell. 2013; 152(5):1173-83, the entire contents of which are incorporated herein by reference.

[0236] Additional suitable nuclease-inactive dCas9 domains will be apparent to those of skill in the art based on this disclosure and knowledge in the field, and are within the scope of this disclosure. Such additional exemplary suitable nuclease-inactive Cas9 domains include, but are not limited to, D10A/H840A, D10A/D839A/H840A, and D10A/D839A/H840A/N863A mutant domains (See, e.g., Prashant et al., CAS9 transcriptional activators for target specificity screening and paired nickases for cooperative genome engineering. Nature Biotechnology. 2013; 31(9): 833-838, the entire contents of which are incorporated herein by reference).

[0237] In some embodiments, dCas9 corresponds to, or comprises in part or in whole, a Cas9 amino acid sequence having one or more mutations that inactivate the Cas9 nuclease activity. In some embodiments, the nuclease-inactive dCas9 domain comprises a D10X mutation and a H840X mutation of the amino acid sequence set forth herein, or a corresponding mutation in any of the amino acid sequences provided herein, wherein X is any amino acid change. In some embodiments, the nuclease-inactive dCas9 domain comprises a D10A mutation and a H840A mutation of the amino acid sequence set forth herein, or a corresponding mutation in any of the amino acid sequences provided herein. In some embodiments, a nuclease-inactive Cas9 domain comprises the amino acid sequence set forth in Cloning vector pPlatTET-gRNA2 (Accession No. BAV54124).

[0238] In some embodiments, a variant Cas9 protein can cleave the complementary strand of a guide target sequence but has reduced ability to cleave the non-complementary strand of a double stranded guide target sequence. For example, the variant Cas9 protein can have a mutation (amino acid substitution) that reduces the function of the RuvC domain. As a non-limiting example, in some embodiments, a variant Cas9 protein has a D10A (aspartate to alanine at amino acid position 10) and can therefore cleave the complementary strand of a double stranded guide target sequence but has reduced ability to cleave the non-complementary strand of a double stranded guide target sequence (thus resulting in a single strand break (SSB) instead of a double strand break (DSB) when the variant Cas9 protein cleaves a double stranded target nucleic acid) (see, for example, Jinek et al., Science. 2012 Aug. 17; 337(6096):816-21).

[0239] In some embodiments, a variant Cas9 protein can cleave the non-complementary strand of a double stranded guide target sequence but has reduced ability to cleave the complementary strand of the guide target sequence. For example, the variant Cas9 protein can have a mutation (amino acid substitution) that reduces the function of the HNH domain (RuvC/HNH/RuvC domain motifs). As a non-limiting example, in some embodiments, the variant Cas9 protein has an H840A (histidine to alanine at amino acid position 840) mutation and can therefore cleave the non-complementary strand of the guide target sequence but has reduced ability to cleave the complementary strand of the guide target sequence (thus resulting in a SSB instead of a DSB when the variant Cas9 protein cleaves a double stranded guide target sequence). Such a Cas9 protein has a reduced ability to cleave a guide target sequence (e.g., a single stranded guide target sequence) but retains the ability to bind a guide target sequence (e.g., a single stranded guide target sequence).

[0240] In some embodiments, a variant Cas9 protein can cleave the non-complementary strand of a double stranded guide target sequence but has reduced ability to cleave the complementary strand of the guide target sequence. For example, the variant Cas9 protein can have a mutation (amino acid substitution) that reduces the function of the HNH domain (RuvC/HNH/RuvC domain motifs). As a non-limiting example, in some embodiments, the variant Cas9 protein has an H840A (histidine to alanine at amino acid position 840) mutation and can therefore cleave the non-complementary strand of the guide target sequence but has reduced ability to cleave the complementary strand of the guide target sequence (thus resulting in a SSB instead of a DSB when the variant Cas9 protein cleaves a double stranded guide target sequence). Such a Cas9 protein has a reduced ability to cleave a guide target sequence (e.g., a single stranded guide target sequence) but retains the ability to bind a guide target sequence (e.g., a single stranded guide target sequence).

[0241] As another non-limiting example, in some embodiments, the variant Cas9 protein harbors W476A and W1126A mutations such that the polypeptide has a reduced ability to cleave a target DNA. Such a Cas9 protein has a reduced ability to cleave a target DNA (e.g., a single stranded target DNA) but retains the ability to bind a target DNA (e.g., a single stranded target DNA).

[0242] As another non-limiting example, in some embodiments, the variant Cas9 protein harbors P475A, W476A, N477A, D1125A, W1126A, and D1127A mutations such that the polypeptide has a reduced ability to cleave a target DNA. Such a Cas9 protein has a reduced ability to cleave a target DNA (e.g., a single stranded target DNA) but retains the ability to bind a target DNA (e.g., a single stranded target DNA).

[0243] As another non-limiting example, in some embodiments, the variant Cas9 protein harbors H840A, W476A, and W1126A, mutations such that the polypeptide has a reduced ability to cleave a target DNA. Such a Cas9 protein has a reduced ability to cleave a target DNA (e.g., a single stranded target DNA) but retains the ability to bind a target DNA (e.g., a single stranded target DNA). As another non-limiting example, in some embodiments, the variant Cas9 protein harbors H840A, D10A, W476A, and W1126A, mutations such that the polypeptide has a reduced ability to cleave a target DNA. Such a Cas9 protein has a reduced ability to cleave a target DNA (e.g., a single stranded target DNA) but retains the ability to bind a target DNA (e.g., a single stranded target DNA). In some embodiments, the variant Cas9 has restored catalytic His residue at position 840 in the Cas9 HNH domain (A840H).

[0244] As another non-limiting example, in some embodiments, the variant Cas9 protein harbors D10A, H840A, P475A, W476A, N477A, D1125A, W1126A, and D1127A mutations such that the polypeptide has a reduced ability to cleave a target DNA. Such a Cas9 protein has a reduced ability to cleave a target DNA (e.g., a single stranded target DNA) but retains the ability to bind a target DNA (e.g., a single stranded target DNA). In some embodiments, when a variant Cas9 protein harbors W476A and W1126A mutations or when the variant Cas9 protein harbors P475A, W476A, N477A, D1125A, W1126A, and D1127A mutations, the variant Cas9 protein does not bind efficiently to a PAM sequence. Thus, in some such embodiments, when such a variant Cas9 protein is used in a method of binding, the method does not require a PAM sequence. In other words, in some embodiments, when such a variant Cas9 protein is used in a method of binding, the method can include a guide RNA, but the method can be performed in the absence of a PAM sequence (and the specificity of binding is therefore provided by the targeting segment of the guide RNA). Other residues can be mutated to achieve the above effects (i.e., inactivate one or the other nuclease portions). As non-limiting examples, residues D10, G12, G17, E762, H840, N854, N863, H982, H983, A984, D986, and/or A987 can be altered (i.e., substituted). Also, mutations other than alanine substitutions are suitable.

[0245] In some embodiments, the variant Cas protein can be spCas9, spCas9-VRQR, spCas9-VRER, xCas9 (sp), saCas9, saCas9-KKH, spCas9-MQKSER, spCas9-LRKIQK, or spCas9-LRVSQL.

[0246] In some embodiments, a modified SpCas9 including amino acid substitutions D1135M, S1136Q, G1218K, E1219F, A1322R, D1332A, R1335E, and T1337R (SpCas9-MQKFRAER) and having specificity for the altered PAM 5′-NGC-3′ was used.

[0247] In some embodiments, the Cas9 is a Cas9 variant having specificity for an altered PAM sequence. In some embodiments, the Additional Cas9 variants and PAM sequences are described in Miller, S. M., et al. Continuous evolution of SpCas9 variants compatible with non-G PAMs, Nat. Biotechnol. (2020), the entirety of which is incorporated herein by reference. in some embodiments, a Cas9 variate have no specific PAM requirements. In some embodiments, a Cas9 variant, e.g. a SpCas9 variant has specificity for a NRNH PAM, wherein R is A or G and H is A, C, or T. In some embodiments, the SpCas9 variant has specificity for a PAM sequence AAA, TAA, CAA, GAA, TAT, GAT, or CAC. In some embodiments, the SpCas9 variant comprises an amino acid substitution at position 1114, 1134, 1135, 1137, 1139, 1151, 1180, 1188, 1211, 1218, 1219, 1221, 1249, 1256, 1264, 1290, 1318, 1317, 1320, 1321, 1323, 1332, 1333, 1335, 1337, or 1339 or a corresponding position thereof. In some embodiments, the SpCas9 variant comprises an amino acid substitution at position 1114, 1135, 1218, 1219, 1221, 1249, 1320, 1321, 1323, 1332, 1333, 1335, or 1337 or a corresponding position thereof. In some embodiments, the SpCas9 variant comprises an amino acid substitution at position 1114, 1134, 1135, 1137, 1139, 1151, 1180, 1188, 1211, 1219, 1221, 1256, 1264, 1290, 1318, 1317, 1320, 1323, 1333 or a corresponding position thereof. In some embodiments, the SpCas9 variant comprises an amino acid substitution at position 1114, 1131, 1135, 1150, 1156, 1180, 1191, 1218, 1219, 1221, 1227, 1249, 1253, 1286, 1293, 1320, 1321, 1332, 1335, 1339 or a corresponding position thereof. In some embodiments, the SpCas9 variant comprises an amino acid substitution at position 1114, 1127, 1135, 1180, 1207, 1219, 1234, 1286, 1301, 1332, 1335, 1337, 1338, 1349 or a corresponding position thereof. Exemplary amino acid substitutions and PAM specificity of SpCas9 variants are shown in Tables 1A-1D.

TABLE 1A

| | SpCas9 amino acid position | | | | | | | | | | | | |
|---|---|---|---|---|---|---|---|---|---|---|---|---|---|
| | 1114 | 1135 | 1218 | 1219 | 1221 | 1249 | 1320 | 1321 | 1323 | 1332 | 1333 | 1335 | 1337 |
| SpCas9 | R | D | G | E | Q | P | A | P | A | D | R | R | T |
| AAA | | N | | V | H | | | | | | G | | |
| AAA | | N | | V | H | | | | | | G | | |
| AAA | | | | V | | | | | | | G | | |
| TAA | G | N | | V | | | | | | | I | | |
| TAA | | N | | V | | | | | | | I | | A |
| TAA | G | N | | V | | | | | | | I | | A |
| CAA | | | | V | | | | | | | K | | |
| CAA | | N | | V | | | | | | | K | | |
| CAA | | N | | V | | | | | | | K | | |
| GAA | | | | V | H | | V | | | | K | | |
| GAA | | N | | V | | | V | | | | K | | |
| GAA | | | | V | H | | V | | | | K | | |
| TAT | | | S | V | H | S | | S | | | | L | |
| TAT | | | S | V | H | S | | S | | | | L | |
| TAT | | | S | V | H | S | | S | | | | L | |
| GAT | | | | V | | | | | | | I | | |
| GAT | | | | V | | | | | D | | | Q | |
| GAT | | | | V | | | | | D | | | Q | |
| CAC | | | | V | | | | | | N | | Q | N |
| CAC | | N | | V | | | | | | | | Q | N |
| CAC | | | | V | | | | | | N | | Q | N |

TABLE 1B

| | SpCas9 amino acid position | | | | | | | | | | | | | | | | | | |
|---|---|---|---|---|---|---|---|---|---|---|---|---|---|---|---|---|---|---|---|
| | 11 | 11 | 11 | 11 | 11 | 11 | 11 | 11 | 12 | 12 | 12 | 12 | 12 | 12 | 13 | 13 | 13 | 13 | 13 |
| | 14 | 34 | 35 | 37 | 39 | 51 | 80 | 88 | 11 | 19 | 21 | 56 | 64 | 90 | 18 | 17 | 20 | 23 | 33 |
| SpCas9 | R | F | D | P | V | K | D | K | K | E | Q | Q | H | V | L | N | A | A | R |
| GAA | | | | | | | | | | V | H | | | | | | V | | K |
| GAA | | | N | S | | | | | | V | | | | | | | V | D | K |
| GAA | | | N | | | | | | | V | H | | Y | | | | V | | K |
| CAA | | | N | | | | | | | V | H | | Y | | | | V | | K |
| CAA | G | | N | S | | | | | | V | H | | Y | | | | V | | K |
| CAA | | | N | | | | | R | | V | H | | | | | | V | | K |
| CAA | | | N | | | | G | | R | V | H | | Y | | | | V | | K |
| CAA | | | N | | | | | | | V | H | | Y | | | | V | | K |
| AAA | | | N | | | | G | | | V | H | R | Y | | | | V | D | K |
| CAA | G | | N | | | | G | | | V | H | | Y | | | | V | D | K |
| CAA | | L | N | | | | G | | | V | H | | Y | | | T | V | D | K |
| TAA | G | | N | | | | G | | | V | H | | Y | G | S | | V | D | K |
| TAA | G | | N | | | E | G | | | V | H | | Y | | S | | V | | K |
| TAA | G | | N | | | | G | | | V | H | | Y | | S | | V | D | K |
| TAA | G | | N | | | | G | | R | V | H | | | | | | V | | K |
| TAA | | | N | | | | G | | R | V | H | | Y | | | | V | | K |
| TAA | G | | N | | A | | G | | | V | H | | | | | | V | | K |
| TAA | G | | N | | | | | | | V | H | | | | | | V | | K |

TABLE 1C

| | SpCas9 amino acid position | | | | | | | | | | | | | | | | | | | |
|---|---|---|---|---|---|---|---|---|---|---|---|---|---|---|---|---|---|---|---|---|
| | 11 | 11 | 11 | 11 | 11 | 11 | 11 | 12 | 12 | 12 | 12 | 12 | 12 | 12 | 12 | 13 | 13 | 13 | 13 | 13 |
| | 14 | 31 | 35 | 50 | 56 | 80 | 91 | 18 | 19 | 21 | 27 | 49 | 53 | 86 | 93 | 20 | 21 | 32 | 35 | 39 |
| SpCas9 | R | Y | D | E | K | D | K | G | E | Q | A | P | E | N | A | A | P | D | R | T |
| SacB. | | | N | | | | N | | V | H | | | | | | V | S | | L | |
| TAT | | | | | | | | | | | | | | | | | | | | |
| SacB. | | | N | | | | | S | V | H | | S | | | | | S | G | L | |
| TAT | | | | | | | | | | | | | | | | | | | | |
| AAT | | | N | | | | | S | V | H | V | S | | K | T | | S | G | L | I |
| TAT | G | | N | | | G | | S | V | H | | S | K | | | | S | G | L | |
| TAT | G | | N | | | G | | S | V | H | | S | | | | | S | G | L | |
| TAT | G | C | N | | | G | | S | V | H | | S | | | | | S | G | L | |
| TAT | G | C | N | | | G | | S | V | H | | S | | | | | S | G | L | |
| TAT | G | C | N | | | G | | S | V | H | | S | | | | | S | G | L | |
| TAT | G | C | N | | E | G | | S | V | H | | S | | | | | S | G | L | |
| TAT | G | C | N | V | | G | | S | V | H | | S | | | | | S | G | L | |
| TAT | | C | N | | | G | | S | V | H | | S | | | | | S | G | L | |
| TAT | G | C | N | | | G | | S | V | H | | S | | | | | S | G | L | |

TABLE 1D

| | SpCas9 amino acid position | | | | | | | | | | | | | |
|---|---|---|---|---|---|---|---|---|---|---|---|---|---|---|
| | 111 | 112 | 113 | 118 | 120 | 121 | 123 | 128 | 130 | 133 | 133 | 133 | 133 | 134 |
| | 4 | 7 | 5 | 0 | 7 | 9 | 4 | 6 | 1 | 2 | 5 | 7 | 8 | 9 |
| SpCas9 | R | D | D | D | E | E | N | N | P | D | R | T | S | H |
| SacB. | | | N | | | V | | | | N | Q | N | | |
| CAC | | | | | | | | | | | | | | |
| AAC | G | | N | | | V | | | | N | Q | N | | |
| AAC | G | | N | | | V | | | | N | Q | N | | |
| TAC | G | | N | | | V | | | | N | Q | N | | |
| TAC | G | | N | | | V | | H | | N | Q | N | | |
| TAC | G | | N | | G | V | D | H | | N | Q | N | | |
| TAC | G | | N | | | V | | | | N | Q | N | | |
| TAC | G | G | N | E | | V | | H | | N | Q | N | | |
| TAC | G | | N | | | V | | H | | N | Q | N | | |
| TAC | G | | N | | | | | | | N | Q | N | T | R |

### Nucleic Acid Programmable DNA Binding Proteins

[0248] Some aspects of the disclosure provide fusion proteins comprising domains that act as nucleic acid programmable DNA binding proteins, which may be used to guide a protein, such as a base editor, to a specific nucleic acid (e.g., DNA or RNA) sequence. In particular embodiments, a fusion protein comprises a nucleic acid programmable DNA binding protein domain and a deaminase domain. Non-limiting examples of nucleic acid programmable DNA binding proteins include, Cas9 (e.g., dCas9 and nCas9),

[0249] In some embodiments, one of the Cas9 domains present in the fusion protein may be replaced with a guide nucleotide sequence-programmable DNA-binding protein domain that has no requirements for a PAM sequence.

[0250] In some embodiments, the Cas9 domain is a Cas9 domain from Staphylococcus aureus (SaCas9). In some embodiments, the SaCas9 domain is a nuclease active SaCas9, a nuclease inactive SaCas9 (SaCas9d), or a SaCas9 nickase (SaCas9n). In some embodiments, the SaCas9 comprises a N579A mutation, or a corresponding mutation in any of the amino acid sequences provided herein.

[0251] In some embodiments, the SaCas9 domain, the SaCas9d domain, or the SaCas9n domain can bind to a nucleic acid sequence having a non-canonical PAM. In some embodiments, the SaCas9 domain, the SaCas9d domain, or the SaCas9n domain can bind to a nucleic acid sequence having a NNGRRT or a NNGRRT PAM sequence. The PAM sequence can be any PAM sequence known in the art. Suitable PAM sequences include, but are not limited to, NGG, NGA, NGC, NGN, NGT, NGCG, NGAG, NGAN, NGNG, NGCN, NGCG, NGTN, NNGRRT, NNNRRT, NNGRR(N), TTTV, TYCV, TYCV, TATV, NNNNGATT, NNAGAAW, or NAAAAC. Y is a pyrimidine; N is any nucleotide base; W is A or T.

[0252] In some embodiments, the SaCas9 domain comprises one or more of a E781X, a N967X, and a R1014X mutation, or a corresponding mutation in any of the amino acid sequences provided herein, wherein X is any amino acid. In some embodiments, the SaCas9 domain comprises one or more of a E781K, a N967K, and a R1014H mutation, or one or more corresponding mutation in any of the amino acid sequences provided herein. In some embodiments, the SaCas9 domain comprises a E781K, a N967K, or a R1014H mutation, or corresponding mutations in any of the amino acid sequences provided herein.

### Exemplary SaCas9 Sequence

(SEQ ID NO: 218)
KRNYILGLDIGITSVGYGIIDYETRDVIDAGVRLFKEANVENNEGRRSKR
GARRLKRRRRHRIQRVKKLLFDYNLLTDHSELSGINPYEARVKGLSQKLS
EEEFSAALLHLAKRRGVHNVNEVEEDTGNELSTKEQISRNSKALEEKYVA
ELQLERLKKDGEVRGSINRFKTSDYVKEAKQLLKVQKAYHOLDQSFIDTY
IDLLETRRTYYEGPGEGSPFGWKDIKEWYEMLMGHCTYFPEELRSVKYAY
NADLYNALNDLNNLVITRDENEKLEYYEKFQIIENVFKQKKKPTLKQIAK
EILVNEEDIKGYRVTSTGKPEFTNLKVYHDIKDITARKEITENAELLDQI
AKILTIYQSSEDIQEELTNLNSELTQEEIEQISNLKGYTGTHNLSLKAIN
LILDELWHTNDNQIAIFNRLKLVPKKVDLSQQKEIPTTLVDDFILSPVVK
RSFIQSIKVINAIIKKYGLPNDIIIELAREKNSKDAQKMINEMQKRNRQT
NERIEEIIRTTGKENAKYLIEKIKLHDMQEGKCLYSLEAIPLEDLLNNPF
NYEVDHIIPRSVSFDNSFNNKVLVKQEENSKKGNRTPFQYLSSSDSKISY
ETFKKHILNLAKGKGRISKTKKEYLLEERDINRFSVQKDFINRNLVDTRY
ATRGLMNLLRSYFRVNNLDVKVKSINGGFTSFLRRKWKFKKERNKGYKHH
AEDALIIANADFIFKEWKKLDKAKKVMENQMFEEKQAESMPEIETEQEYK
EIFITPHQIKHIKDFKDYKYSHRVDKKPNRELINDTLYSTRKDDKGNTLI
VNNLNGLYDKDNDKLKKLINKSPEKLLMYHHDPQTYQKLKLIMEQYGDEK
NPLYKYYEETGNYLTKYSKKDNGPVIKKIKYYGNKLNAHLDITDDYPNSR
NKVVKLSLKPYRFDVYLDNGVYKFVTVKNLDVIKKENYYEVNSKCYEEAK
KLKKISNQAEFIASFYNNDLIKINGELYRVIGVNNDLLNRIEVNMIDITY
REYLENMNDKRPPRIIKTIASKTQSIKKYSTDILGNLYEVKSKKHPQIIK
KG

[0254] Residue N579 above, which is underlined and in bold, may be mutated (e.g., to a A579) to yield a SaCas9 nickase.

### Exemplary SaCas9n Sequence

(SEQ ID NO: 219)
KRNYILGLDIGITSVGYGIIDYETRDVIDAGVRLFKEANVENNEGRRSKR
GARRLKRRRRHRIQRVKKLLFDYNLLTDHSELSGINPYEARVKGLSQKLS
EEEFSAALLHLAKRRGVHNVNEVEEDTGNELSTKEQISRNSKALEEKYVA
ELQLERLKKDGEVRGSINRFKTSDYVKEAKQLLKVQKAYHQLDQSFIDTY
IDLLETRRTYYEGPGEGSPFGWKDIKEWYEMLMGHCTYFPEELRSVKYAY
NADLYNALNDLNNLVITRDENEKLEYYEKFQIIENVFKQKKKPTLKQIAK
EILVNEEDIKGYRVTSTGKPEFTNLKVYHDIKDITARKEITENAELLDQI
AKILTIYQSSEDIQEELTNLNSELTQEEIEQISNLKGYTGTHNLSLKAIN
LILDELWHTNDNQIAIFNRLKLVPKKVDLSQQKEIPTTLVDDFILSPVVK
RSFIQSIKVINAIIKKYGLPNDIIIELAREKNSKDAQKMINEMQKRNRQT
NERIEEIIRTTGKENAKYLIEKIKLHDMQEGKCLYSLEAIPLEDLLNNPF
NYEVDHIIPRSVSFDNSFNNKVLVKQEEASKKGNRTPFQYLSSSDSKISY
ETFKKHILNLAKGKGRISKTKKEYLLEERDINRFSVQKDFINRNLVDTRY
ATRGLMNLLRSYFRVNNLDVKVKSINGGFTSFLRRKWKFKKERNKGYKHH
AEDALIIANADFIFKEWKKLDKAKKVMENQMFEEKQAESMPEIETEQEYK
EIFITPHQIKHIKDFKDYKYSHRVDKKPNRELINDTLYSTRKDDKGNTLI
VNNLNGLYDKDNDKLKKLINKSPEKLLMYHHDPQTYQKLKLIMEQYGDEK
NPLYKYYEETGNYLTKYSKKDNGPVIKKIKYYGNKLNAHLDITDDYPNSR
NKVVKLSLKPYRFDVYLDNGVYKFVTVKNLDVIKKENYYEVNSKCYEEAK
KLKKISNQAEFIASFYNNDLIKINGELYRVIGVNNDLLNRIEVNMIDITY
REYLENMNDKRPPRIIKTIASKTQSIKKYSTDILGNLYEVKSKKHPQIIK
KG.

[0256] Residue A579 above, which can be mutated from N579 to yield a SaCas9 nickase, is underlined and in bold.

[0257] In some embodiments, the napDNAbp is a circular permutant (e.g., SEQ ID NO: 238). In the following sequence, the plain text denotes an adenosine deaminase sequence, bold sequence indicates sequence derived from Cas9, the italicized sequence denotes a linker sequence, and the underlined sequence denotes a bipartite nuclear localization sequence, and double underlined sequence indicates mutations. The asterisk (*) denotes a STOP codon. CP5 (with MSP “NGC=Pam Variant with mutations Regular Cas9 likes NGG” PID=Protein Interacting Domain and “D10A” nickase):

(SEQ ID NO: 238)
EIGKATAKYFFYSNIMNFFKTEITLANGEIRKRPLIETNGETGEIVWDKG
RDFATVRKVLSMPQVNIVKKTEVQTGGFSKESILPKRNSDKLIARKKDWD
PKKYGGFMQPTVAYSVLVVAKVEKGKSKKLKSVKELLGITIMERSSFEKN
PIDFLEAKGYKEVKKDLIIKLPKYSLFELENGRKRMLASAKFLQKGNELA
LPSKYVNFLYLASHYEKLKGSPEDNEQKQLFVEQHKHYLDEIIEQISEFS
KRVILADANLDKVLSAYNKHRDKPIREQAENIIHLFTLTNLGAPRAFKYF
DTTIARKEYRSTKEVLDATLIHQSITGLYETRIDLSQLGGDGGSGGSGGS
GGSGGSGGSGGMDKKYSIGLAIGTNSVGWAVITDEYKVPSKKFKVLGNTD
RHSIKKNLIGALLFDSGETAEATRLKRTARRRYTRRKNRICYLQEIFSNE
MAKVDDSFFHRLEESFLVEEDKKHERHPIFGNIVDEVAYHEKYPTIYHLR
KKLVDSTDKADLRLIYLALAHMIKFRGHFLIEGDLNPDNSDVDKLFIQLV
QTYNQLFEENPINASGVDAKAILSARLSKSRRLENLIAQLPGEKKNGLFG
NLIALSLGLTPNFKSNFDLAEDAKLQLSKDTYDDDLDNLLAQIGDQYADL
FLAAKNLSDAILLSDILRVNTEITKAPLSASMIKRYDEHHQDLTLLKALV
RQQLPEKYKEIFFDQSKNGYAGYIDGGASQEEFYKFIKPILEKMDGTEEL
LVKLNREDLLRKQRTFDNGSIPHQIHLGELHAILRRQEDFYPFLKDNREK
IEKILTFRIPYYVGPLARGNSRFAWMTRKSEETITPWNFEEVVDKGASAQ
SFIERMTNFDKNLPNEKVLPKHSLLYEYFTVYNELTKVKYVTEGMRKPAF
LSGEQKKAIVDLLFKTNRKVTVKQLKEDYFKKIECFDSVEISGVEDRFNA
SLGTYHDLLKIIKDKDFLDNEENEDILEDIVLTLTLFEDREMIEERLKTY
AHLFDDKVMKQLKRRRYTGWGRLSRKLINGIRDKQSGKTILDFLKSDGFA
NRNFMQLIHDDSLTFKEDIQKAQVSGQGDSLHEHIANLAGSPAIKKGILQ
TVKVVDELVKVMGRHKPENIVIEMARENQTTQKGQKNSRERMKRIEEGIK
ELGSQILKEHPVENTQLQNEKLYLYYLQNGRDMYVDQELDINRLSDYDVD
HIVPQSFLKDDSIDNKVLTRSDKNRGKSDNVPSEEVVKKMKNYWRQLLNA
KLITQRKFDNLTKAERGGLSELDKAGFIKRQLVETRQITKHVAQILDSRM
NTKYDENDKLIREVKVITLKSKLVSDFRKDFQFYKVREINNYHHAHDAYL
NAVVGTALIKKYPKLESEFVYGDYKVYDVRKMIAKSEQEGADKRTADGSE
FESPKKKRKV*.

[0258] Single effectors of microbial CRISPR-Cas systems include, without limitation, Cas9, Cpf1, Cas12b/C2c1, and Cas12c/C2c3. Typically, microbial CRISPR-Cas systems are divided into Class 1 and Class 2 systems. Class 1 systems have multisubunit effector complexes, while Class 2 systems have a single protein effector. For example, Cas9 and Cpf1 are Class 2 effectors. In addition to Cas9 and Cpf1, three distinct Class 2 CRISPR-Cas systems (Cas12b/C2c1, and Cas12c/C2c3) have been described by Shmakov et al., “Discovery and Functional Characterization of Diverse Class 2 CRISPR Cas Systems”, Mol. Cell, 2015 Nov. 5; 60(3): 385-397, the entire contents of which is hereby incorporated by reference. Effectors of two of the systems, Cas12b/C2c1, and Cas12c/C2c3, contain RuvC-like endonuclease domains related to Cpf1. A third system contains an effector with two predicated HEPN RNase domains. Production of mature CRISPR RNA is tracrRNA-independent, unlike production of CRISPR RNA by Cas12b/C2c1. Cas12b/C2c1 depends on both CRISPR RNA and tracrRNA for DNA cleavage.

[0259] In some embodiments, the napDNAbp is a circular permutant (e.g., SEQ ID NO: 238).

[0260] The crystal structure of Alicyclobaccillus acidoterrastris Cas12b/C2c1 (AacC2c1) has been reported in complex with a chimeric single-molecule guide RNA (sgRNA). See e.g., Liu et al., “C2c1-sgRNA Complex Structure Reveals RNA-Guided DNA Cleavage Mechanism”, Mol. Cell, 2017 Jan. 19; 65(2):310-322, the entire contents of which are hereby incorporated by reference. The crystal structure has also been reported in Alicyclobacillus acidoterrestris C2c1 bound to target DNAs as ternary complexes. See e.g., Yang et al., “PAM-dependent Target DNA Recognition and Cleavage by C2C1 CRISPR-Cas endonuclease”, Cell, 2016 Dec. 15; 167(7):1814-1828, the entire contents of which are hereby incorporated by reference. Catalytically competent conformations of AacC2c1, both with target and non-target DNA strands, have been captured independently positioned within a single RuvC catalytic pocket, with Cas12b/C2c1-mediated cleavage resulting in a staggered seven-nucleotide break of target DNA. Structural comparisons between Cas12b/C2c1 ternary complexes and previously identified Cas9 and Cpf1 counterparts demonstrate the diversity of mechanisms used by CRISPR-Cas9 systems.

[0261] In some embodiments, the nucleic acid programmable DNA binding protein (napDNAbp) of any of the fusion proteins provided herein may be a Cas12b/C2c1, or a Cas12c/C2c3 protein. In some embodiments, the napDNAbp is a Cas12b/C2c1 protein. In some embodiments, the napDNAbp is a Cas12c/C2c3 protein. In some embodiments, the napDNAbp comprises an amino acid sequence that is at least 85%, at least 90%, at least 91%, at least 92%, at least 93%, at least 94%, at least 95%, at least 96%, at least 97%, at least 98%, at least 99%, or at ease 99.5% identical to a naturally-occurring Cas12b/C2c1 or Cas12c/C2c3 protein. In some embodiments, the napDNAbp is a naturally-occurring Cas12b/C2c1 or Cas12c/C2c3 protein. In some embodiments, the napDNAbp comprises an amino acid sequence that is at least 85%, at least 90%, at least 91%, at least 92%, at least 93%, at least 94%, at least 95%, at least 96%, at least 97%, at least 98%, at least 99%, or at ease 99.5% identical to any one of the napDNAbp sequences provided herein. It should be appreciated that Cas12b/C2c1 or Cas12c/C2c3 from other bacterial species may also be used in accordance with the present disclosure.

[0262] In some embodiments, a napDNAbp refers to Cas12c. In some embodiments, the Cas12c protein is a Cas12c1 (SEQ ID NO: 239) or a variant of Cas12c1. In some embodiments, the Cas12 protein is a Cas12c2 (SEQ ID NO: 240) or a variant of Cas12c2. In some embodiments, the Cas12 protein is a Cas12c protein from Oleiphilus sp. HI0009 (i.e., OspCas12c; SEQ ID NO: 241) or a variant of OspCas12c. These Cas12c molecules have been described in Yan et al., “Functionally Diverse Type V CRISPR-Cas Systems,” Science, 2019 Jan. 4; 363: 88-91; the entire contents of which is hereby incorporated by reference. In some embodiments, the napDNAbp comprises an amino acid sequence that is at least 85%, at least 90%, at least 91%, at least 92%, at least 93%, at least 94%, at least 95%, at least 96%, at least 97%, at least 98%, at least 99%, or at least 99.5% identical to a naturally-occurring Cas12c1, Cas12c2, or OspCas12c protein. In some embodiments, the napDNAbp is a naturally-occurring Cas12c1, Cas12c2, or OspCas12c protein. In some embodiments, the napDNAbp comprises an amino acid sequence that is at least 85%, at least 90%, at least 91%, at least 92%, at least 93%, at least 94%, at least 95%, at least 96%, at least 97%, at least 98%, at least 99%, or at ease 99.5% identical to any Cas12c1, Cas12c2, or OspCas12c protein described herein. It should be appreciated that Cas12c1, Cas12c2, or OspCas12c from other bacterial species may also be used in accordance with the present disclosure.

[0263] In some embodiments, a napDNAbp refers to Cas12g, Cas12h, or Cas12i, which have been described in, for example, Yan et al., “Functionally Diverse Type V CRISPR-Cas Systems,” Science, 2019 Jan. 4; 363: 88-91; the entire contents of each is hereby incorporated by reference. Exemplary Cas12g, Cas12h, and Cas12i polypeptide sequences are provided in the Sequence Listing as SEQ ID NOs: 242-245. By aggregating more than 10 terabytes of sequence data, new classifications of Type V Cas proteins were identified that showed weak similarity to previously characterized Class V protein, including Cas12g, Cas12h, and Cas12i. In some embodiments, the Cas12 protein is a Cas12g or a variant of Cas12g. In some embodiments, the Cas12 protein is a Cas12h or a variant of Cas12h. In some embodiments, the Cas12 protein is a Cas12i or a variant of Cas12i. It should be appreciated that other RNA-guided DNA binding proteins may be used as a napDNAbp, and are within the scope of this disclosure. In some embodiments, the napDNAbp comprises an amino acid sequence that is at least 85%, at least 90%, at least 91%, at least 92%, at least 93%, at least 94%, at least 95%, at least 96%, at least 97%, at least 98%, at least 99%, or at least 99.5% identical to a naturally-occurring Cas12g, Cas12h, or Cas12i protein. In some embodiments, the napDNAbp is a naturally-occurring Cas12g, Cas12h, or Cas12i protein. In some embodiments, the napDNAbp comprises an amino acid sequence that is at least 85%, at least 90%, at least 91%, at least 92%, at least 93%, at least 94%, at least 95%, at least 96%, at least 97%, at least 98%, at least 99%, or at ease 99.5% identical to any Cas12g, Cas12h, or Cas12i protein described herein. It should be appreciated that Cas12g, Cas12h, or Cas12i from other bacterial species may also be used in accordance with the present disclosure. In some embodiments, the Cas12i is a Cas12i1 or a Cas12i2.

[0264] In some embodiments, the nucleic acid programmable DNA binding protein (napDNAbp) of any of the fusion proteins provided herein may be a Cas12j/CasΦ protein. Cas12j/CasΦ is described in Pausch et al., “CRISPR-CasΦ from huge phages is a hypercompact genome editor,” Science, 17 Jul. 2020, Vol. 369, Issue 6501, pp. 333-337, which is incorporated herein by reference in its entirety. In some embodiments, the napDNAbp comprises an amino acid sequence that is at least 85%, at least 90%, at least 91%, at least 92%, at least 93%, at least 94%, at least 95%, at least 96%, at least 97%, at least 98%, at least 99%, or at ease 99.5% identical to a naturally-occurring Cas12j/CasΦ protein. In some embodiments, the napDNAbp is a naturally-occurring Cas12j/CasΦ protein. In some embodiments, the napDNAbp is a nuclease inactive (“dead”) Cas12j/CasΦ protein. It should be appreciated that Cas12j/CasΦ from other species may also be used in accordance with the present disclosure.

[0265] In some embodiments, the nucleic acid programmable DNA binding protein (napDNAbp) of any of the fusion proteins provided herein may be a Cas12j/CasΦ protein. Cas12j/CasΦ is described in Pausch et al., “CRISPR-CasΦ from huge phages is a hypercompact genome editor,” Science, 17 Jul. 2020, Vol. 369, Issue 6501, pp. 333-337, which is incorporated herein by reference in its entirety. In some embodiments, the napDNAbp comprises an amino acid sequence that is at least 85%, at least 90%, at least 91%, at least 92%, at least 93%, at least 94%, at least 95%, at least 96%, at least 97%, at least 98%, at least 99%, or at ease 99.5% identical to a naturally-occurring Cas12j/CasΦ protein. In some embodiments, the napDNAbp is a naturally-occurring Cas12j/CasΦ protein. In some embodiments, the napDNAbp is a nuclease inactive (“dead”) Cas12j/CasΦ protein. It should be appreciated that Cas12j/CasΦ from other species may also be used in accordance with the present disclosure.

### Guide Polynucleotides

[0266] A polynucleotide programmable nucleotide binding domain, when in conjunction with a bound guide polynucleotide (e.g., gRNA), can specifically bind to a target polynucleotide sequence (i.e., via complementary base pairing between bases of the bound guide nucleic acid and bases of the target polynucleotide sequence) and thereby localize the base editor to the target nucleic acid sequence desired to be edited. In some embodiments, the target polynucleotide sequence comprises single-stranded DNA or double-stranded DNA. In some embodiments, the target polynucleotide sequence comprises RNA. In some embodiments, the target polynucleotide sequence comprises a DNA-RNA hybrid.

[0267] In an embodiment, the guide polynucleotide is a guide RNA. Cas9/crRNA/tracrRNA endonucleolytically cleaves linear or circular dsDNA target complementary to the spacer. The target strand not complementary to crRNA is first cut endonucleolytically, then trimmed 3′-5′ exonucleolytically. In nature, DNA-binding and cleavage typically requires protein and both RNAs. However, single guide RNAs (“sgRNA,” or simply “gRNA”) can be engineered so as to incorporate aspects of both the crRNA and tracrRNA into a single RNA species. See, e.g., Jinek M. et al., Science 337:816-821(2012), the entire contents of which is hereby incorporated by reference.

[0268] In some embodiments, the guide polynucleotide is at least one single guide RNA (“sgRNA” or “gRNA”). In some embodiments, the guide polynucleotide is at least one tracrRNA. In some embodiments, the guide polynucleotide does not require PAM sequence to guide the polynucleotide-programmable DNA-binding domain (e.g., Cas9) to the target nucleotide sequence.

[0269] A guide polynucleotide can be DNA. A guide polynucleotide can be RNA. As will be appreciated by one having skill in the art, in a guide polynucleotide sequence uracil (U) replaces thymine (T) in the sequence. In some embodiments, the guide polynucleotide comprises natural nucleotides (e.g., adenosine). In some embodiments, the guide polynucleotide comprises non-natural (or unnatural) nucleotides (e.g., peptide nucleic acid or nucleotide analogs). In some embodiments, the targeting region of a guide nucleic acid sequence can be at least 15, 16, 17, 18, 19, 20, 21, 22, 23, 24, 25, 26, 27, 28, 29, or 30 nucleotides in length. A targeting region of a guide nucleic acid can be between 10-30 nucleotides in length, or between 15-25 nucleotides in length, or between 15-20 nucleotides in length. In some embodiments, a guide polynucleotide may be truncated by 1, 2, 3, 4, etc. nucleotides, particularly at the 5′ end. By way of nonlimiting example, a guide polynucleotide of 20 nucleotides in length may be truncated by 1, 2, 3, 4, etc. nucleotides, particularly at the 5′ end.

[0270] In some embodiments, a guide polynucleotide comprises two or more individual polynucleotides, which can interact with one another via for example complementary base pairing (e.g., a dual guide polynucleotide). For example, a guide polynucleotide can comprise a CRISPR RNA (crRNA) and a trans-activating CRISPR RNA (tracrRNA). For example, a guide polynucleotide can comprise one or more trans-activating CRISPR RNA (tracrRNA).

[0271] In type II CRISPR systems, targeting of a nucleic acid by a CRISPR protein (e.g., Cas9) typically requires complementary base pairing between a first RNA molecule (crRNA) comprising a sequence that recognizes the target sequence and a second RNA molecule (trRNA) comprising repeat sequences which forms a scaffold region that stabilizes the guide RNA-CRISPR protein complex. Such dual guide RNA systems can be employed as a guide polynucleotide to direct the base editors disclosed herein to a target polynucleotide sequence.

[0272] In some embodiments, the base editor provided herein utilizes a single guide polynucleotide (e.g., sgRNA). In some embodiments, the base editor provided herein utilizes a dual guide polynucleotide (e.g., dual gRNAs). In some embodiments, the base editor provided herein utilizes one or more guide polynucleotide (e.g., multiple gRNA). In some embodiments, a single guide polynucleotide is utilized for different base editors described herein. For example, a single guide polynucleotide can be utilized for an adenosine base editor.

[0273] In some embodiments, the methods described herein can utilize an engineered Cas protein. A guide RNA (gRNA) is a short synthetic RNA composed of a scaffold sequence necessary for Cas-binding and a user-defined ˜20 nucleotide spacer that defines the genomic target to be modified. Exemplary gRNA scaffold sequences are provided in the sequence listing as SEQ ID NOs: 317-327. Thus, a skilled artisan can change the genomic target of the Cas protein specificity is partially determined by how specific the gRNA targeting sequence is for the genomic target compared to the rest of the genome.

[0274] In other embodiments, a guide polynucleotide can comprise both the polynucleotide targeting portion of the nucleic acid and the scaffold portion of the nucleic acid in a single molecule (i.e., a single-molecule guide nucleic acid). For example, a single-molecule guide polynucleotide can be a single guide RNA (sgRNA or gRNA). Herein the term guide polynucleotide sequence contemplates any single, dual or multi-molecule nucleic acid capable of interacting with and directing a base editor to a target polynucleotide sequence.

[0275] Typically, a guide polynucleotide (e.g., crRNA/trRNA complex or a gRNA) comprises a “polynucleotide-targeting segment” that includes a sequence capable of recognizing and binding to a target polynucleotide sequence, and a “protein-binding segment” that stabilizes the guide polynucleotide within a polynucleotide programmable nucleotide binding domain component of a base editor. In some embodiments, the polynucleotide targeting segment of the guide polynucleotide recognizes and binds to a DNA polynucleotide, thereby facilitating the editing of a base in DNA. In other embodiments, the polynucleotide targeting segment of the guide polynucleotide recognizes and binds to an RNA polynucleotide, thereby facilitating the editing of a base in RNA. Herein a “segment” refers to a section or region of a molecule, e.g., a contiguous stretch of nucleotides in the guide polynucleotide. A segment can also refer to a region/section of a complex such that a segment can comprise regions of more than one molecule. For example, where a guide polynucleotide comprises multiple nucleic acid molecules, the protein-binding segment of can include all or a portion of multiple separate molecules that are for instance hybridized along a region of complementarity. In some embodiments, a protein-binding segment of a DNA-targeting RNA that comprises two separate molecules can comprise (i) base pairs 40-75 of a first RNA molecule that is 100 base pairs in length; and (ii) base pairs 10-25 of a second RNA molecule that is 50 base pairs in length. The definition of “segment,” unless otherwise specifically defined in a particular context, is not limited to a specific number of total base pairs, is not limited to any particular number of base pairs from a given RNA molecule, is not limited to a particular number of separate molecules within a complex, and can include regions of RNA molecules that are of any total length and can include regions with complementarity to other molecules.

[0276] A guide RNA or a guide polynucleotide can comprise two or more RNAs, e.g., CRISPR RNA (crRNA) and transactivating crRNA (tracrRNA). A guide RNA or a guide polynucleotide can sometimes comprise a single-chain RNA, or single guide RNA (sgRNA) formed by fusion of a portion (e.g., a functional portion) of crRNA and tracrRNA. A guide RNA or a guide polynucleotide can also be a dual RNA comprising a crRNA and a tracrRNA. Furthermore, a crRNA can hybridize with a target DNA.

[0277] As discussed above, a guide RNA or a guide polynucleotide can be an expression product. For example, a DNA that encodes a guide RNA can be a vector comprising a sequence coding for the guide RNA. A guide RNA or a guide polynucleotide can be transferred into a cell by transfecting the cell with an isolated guide RNA or plasmid DNA comprising a sequence coding for the guide RNA and a promoter. A guide RNA or a guide polynucleotide can also be transferred into a cell in other way, such as using virus-mediated gene delivery.

[0278] A guide RNA or a guide polynucleotide can be isolated. For example, a guide RNA can be transfected in the form of an isolated RNA into a cell or organism. A guide RNA can be prepared by in vitro transcription using any in vitro transcription system known in the art. A guide RNA can be transferred to a cell in the form of isolated RNA rather than in the form of plasmid comprising encoding sequence for a guide RNA.

[0279] A guide RNA or a guide polynucleotide can comprise three regions: a first region at the 5′ end that can be complementary to a target site in a chromosomal sequence, a second internal region that can form a stem loop structure, and a third 3′ region that can be single-stranded. A first region of each guide RNA can also be different such that each guide RNA guides a fusion protein to a specific target site. Further, second and third regions of each guide RNA can be identical in all guide RNAs.

[0280] A first region of a guide RNA or a guide polynucleotide can be complementary to sequence at a target site in a chromosomal sequence such that the first region of the guide RNA can base pair with the target site. In some embodiments, a first region of a guide RNA can comprise from or from about 10 nucleotides to 25 nucleotides (i.e., from 10 nucleotides to nucleotides; or from about 10 nucleotides to about 25 nucleotides; or from 10 nucleotides to about 25 nucleotides; or from about 10 nucleotides to 25 nucleotides) or more. For example, a region of base pairing between a first region of a guide RNA and a target site in a chromosomal sequence can be or can be about 10, 11, 12, 13, 14, 15, 16, 17, 18, 19, 20, 22, 23, 24, 25, or more nucleotides in length. In some embodiments, a first region of a guide RNA can be or can be about 19, 20, or 21 nucleotides in length.

[0281] A guide RNA or a guide polynucleotide can also comprise a second region that forms a secondary structure. For example, a secondary structure formed by a guide RNA can comprise a stem (or hairpin) and a loop. A length of a loop and a stem can vary. For example, a loop can range from or from about 3 to 10 nucleotides in length, and a stem can range from or from about 6 to 20 base pairs in length. A stem can comprise one or more bulges of 1 to 10 or about 10 nucleotides. The overall length of a second region can range from or from about 16 to 60 nucleotides in length. For example, a loop can be or can be about 4 nucleotides in length and a stem can be or can be about 12 base pairs.

[0282] A guide RNA or a guide polynucleotide can also comprise a third region at the 3′ end that can be essentially single-stranded. For example, a third region is sometimes not complementarity to any chromosomal sequence in a cell of interest and is sometimes not complementarity to the rest of a guide RNA. Further, the length of a third region can vary. A third region can be more than or more than about 4 nucleotides in length. For example, the length of a third region can range from or from about 5 to 60 nucleotides in length.

[0283] A guide RNA or a guide polynucleotide can target any exon or intron of a gene target. In some embodiments, a guide can target exon 1 or 2 of a gene; in other embodiments, a guide can target exon 3 or 4 of a gene. A composition can comprise multiple guide RNAs that all target the same exon or in some embodiments, multiple guide RNAs that can target different exons. An exon and an intron of a gene can be targeted.

[0284] A guide RNA or a guide polynucleotide can target a nucleic acid sequence of or of about 20 nucleotides. A target nucleic acid can be less than or less than about 20 nucleotides. A target nucleic acid can be at least or at least about 5, 10, 15, 16, 17, 18, 19, 20, 21, 22, 23, 24, 25, 30, or anywhere between 1-100 nucleotides in length. A target nucleic acid can be at most or at most about 5, 10, 15, 16, 17, 18, 19, 20, 21, 22, 23, 24, 25, 30, 40, 50, or anywhere between 1-100 nucleotides in length. A target nucleic acid sequence can be or can be about 20 bases immediately 5′ of the first nucleotide of the PAM. A guide RNA can target a nucleic acid sequence. A target nucleic acid can be at least or at least about 1-10, 1-20, 1-30, 1-40, 1-50, 1-60, 1-70, 1-80, 1-90, or 1-100 nucleotides.

[0285] A guide polynucleotide, for example, a guide RNA, can refer to a nucleic acid that can hybridize to another nucleic acid, for example, the target nucleic acid or protospacer in a genome of a cell. A guide polynucleotide can be RNA. A guide polynucleotide can be DNA. The guide polynucleotide can be programmed or designed to bind to a sequence of nucleic acid site-specifically. A guide polynucleotide can comprise a polynucleotide chain and can be called a single guide polynucleotide. A guide polynucleotide can comprise two polynucleotide chains and can be called a double guide polynucleotide. A guide RNA can be introduced into a cell or embryo as an RNA molecule. For example, an RNA molecule can be transcribed in vitro and/or can be chemically synthesized. An RNA can be transcribed from a synthetic DNA molecule, e.g., a gBlocks® gene fragment. A guide RNA can then be introduced into a cell or embryo as an RNA molecule. A guide RNA can also be introduced into a cell or embryo in the form of a non-RNA nucleic acid molecule, e.g., a DNA molecule. For example, a DNA encoding a guide RNA can be operably linked to promoter control sequence for expression of the guide RNA in a cell or embryo of interest. An RNA coding sequence can be operably linked to a promoter sequence that is recognized by RNA polymerase III (Pol III). Plasmid vectors that can be used to express guide RNA include, but are not limited to, px330 vectors and px333 vectors. In some embodiments, a plasmid vector (e.g., px333 vector) can comprise at least two guide RNA-encoding DNA sequences.

[0286] Methods for selecting, designing, and validating guide polynucleotides, e.g., guide RNAs and targeting sequences are described herein and known to those skilled in the art. For example, to minimize the impact of potential substrate promiscuity of a deaminase domain in the nucleobase editor system (e.g., an AID domain), the number of residues that could unintentionally be targeted for deamination (e.g., off-target C residues that could potentially reside on ssDNA within the target nucleic acid locus) may be minimized. In addition, software tools can be used to optimize the gRNAs corresponding to a target nucleic acid sequence, e.g., to minimize total off-target activity across the genome. For example, for each possible targeting domain choice using S. pyogenes Cas9, all off-target sequences (preceding selected PAMs, e.g., NAG or NGG) may be identified across the genome that contain up to certain number (e.g., 1, 2, 3, 4, 5, 6, 7, 8, 9, or 10) of mismatched base-pairs. First regions of gRNAs complementary to a target site can be identified, and all first regions (e.g., crRNAs) can be ranked according to its total predicted off-target score; the top-ranked targeting domains represent those that are likely to have the greatest on-target and the least off-target activity. Candidate targeting gRNAs can be functionally evaluated by using methods known in the art and/or as set forth herein.

[0287] As a non-limiting example, target DNA hybridizing sequences in crRNAs of a guide RNA for use with Cas9s may be identified using a DNA sequence searching algorithm. gRNA design may be carried out using custom gRNA design software based on the public tool cas-offinder as described in Bae S., Park J., & Kim J.-S. Cas-OFFinder: A fast and versatile algorithm that searches for potential off-target sites of Cas9 RNA-guided endonucleases. Bioinformatics 30, 1473-1475 (2014). This software scores guides after calculating their genome-wide off-target propensity. Typically matches ranging from perfect matches to 7 mismatches are considered for guides ranging in length from 17 to 24. Once the off-target sites are computationally-determined, an aggregate score is calculated for each guide and summarized in a tabular output using a web-interface. In addition to identifying potential target sites adjacent to PAM sequences, the software also identifies all PAM adjacent sequences that differ by 1, 2, 3 or more than 3 nucleotides from the selected target sites. Genomic DNA sequences for a target nucleic acid sequence, e.g., a target gene may be obtained and repeat elements may be screened using publicly available tools, for example, the RepeatMasker program. RepeatMasker searches input DNA sequences for repeated elements and regions of low complexity. The output is a detailed annotation of the repeats present in a given query sequence.

[0288] Following identification, first regions of guide RNAs, e.g., crRNAs, may be ranked into tiers based on their distance to the target site, their orthogonality and presence of 5′ nucleotides for close matches with relevant PAM sequences (for example, a 5′ G based on identification of close matches in the human genome containing a relevant PAM e.g., NGG PAM for S. pyogenes, NNGRRT or NNGRRV PAM for S. aureus). As used herein, orthogonality refers to the number of sequences in the human genome that contain a minimum number of mismatches to the target sequence. A “high level of orthogonality” or “good orthogonality” may, for example, refer to 20-mer targeting domains that have no identical sequences in the human genome besides the intended target, nor any sequences that contain one or two mismatches in the target sequence. Targeting domains with good orthogonality may be selected to minimize off-target DNA cleavage.

[0289] In some embodiments, a reporter system may be used for detecting base-editing activity and testing candidate guide polynucleotides. In some embodiments, a reporter system may comprise a reporter gene based assay where base editing activity leads to expression of the reporter gene. For example, a reporter system may include a reporter gene comprising a deactivated start codon, e.g., a mutation on the template strand from 3′-TAC-5′ to 3′-CAC-5′. Upon successful deamination of the target C, the corresponding mRNA will be transcribed as 5′-AUG-3′ instead of 5′-GUG-3′, enabling the translation of the reporter gene. Suitable reporter genes will be apparent to those of skill in the art. Non-limiting examples of reporter genes include gene encoding green fluorescence protein (GFP), red fluorescence protein (RFP), luciferase, secreted alkaline phosphatase (SEAP), or any other gene whose expression are detectable and apparent to those skilled in the art. The reporter system can be used to test many different gRNAs, e.g., in order to determine which nucleotide residue(s) with respect to the target DNA sequence the respective deaminase will target. sgRNAs that target non-template strand nucleotide residues can also be tested in order to assess off-target effects of a specific base editing protein, e.g., a Cas9 deaminase fusion protein. In some embodiments, such gRNAs can be designed such that the mutated start codon will not be base-paired with the gRNA. The guide polynucleotides can comprise standard nucleotides, modified nucleotides (e.g., pseudouridine), nucleotide isomers, and/or nucleotide analogs. In some embodiments, the guide polynucleotide can comprise at least one detectable label. The detectable label can be a fluorophore (e.g., FAM, TMR, Cy3, Cy5, Texas Red, Oregon Green, Alexa Fluors, Halo tags, or any other suitable fluorescent dye), a detection tag (e.g., biotin, digoxigenin, and the like), quantum dots, or gold particles.

[0290] The guide polynucleotides can be synthesized chemically and/or enzymatically. For example, the guide RNA can be synthesized using standard phosphoramidite-based solid-phase synthesis methods. Alternatively, the guide RNA can be synthesized in vitro by operably linking DNA encoding the guide RNA to a promoter control sequence that is recognized by a phage RNA polymerase. Examples of suitable phage promoter sequences include T7, T3, SP6 promoter sequences, or variations thereof. In embodiments in which the guide RNA comprises two separate molecules (e.g., crRNA and tracrRNA), the crRNA can be chemically synthesized and the tracrRNA can be enzymatically synthesized.

[0291] In some embodiments, a base editor system may comprise multiple guide polynucleotides, e.g., gRNAs. For example, the gRNAs may target the base editor to one or more target loci (e.g., at least one (1) gRNA, at least 2 gRNA, at least 5 gRNA, at least 10 gRNA, at least 20 gRNA, at least 30 g RNA, or at least 50 gRNA). In some embodiments, multiple gRNA sequences can be tandemly arranged and are preferably separated by a direct repeat.

[0292] A DNA sequence encoding a guide RNA or a guide polynucleotide can also be part of a vector. In some embodiments, a vector comprises additional expression control sequences (e.g., enhancer sequences, Kozak sequences, polyadenylation sequences, transcriptional termination sequences, etc.), selectable marker sequences (e.g., GFP or antibiotic resistance genes such as puromycin), origins of replication, and the like. A DNA molecule encoding a guide RNA or a guide polynucleotide can be circular or linear.

[0293] In some embodiments, one or more components of a base editor system may be encoded by DNA sequences. Such DNA sequences may be introduced into an expression system, e.g., a cell, together or separately. For example, DNA sequences encoding a polynucleotide programmable nucleotide binding domain and a guide RNA may be introduced into a cell, each DNA sequence can be part of a separate molecule (e.g., one vector containing the polynucleotide programmable nucleotide binding domain coding sequence and a second vector containing the guide RNA coding sequence) or both can be part of a same molecule (e.g., one vector containing coding (and regulatory) sequence for both the polynucleotide programmable nucleotide binding domain and the guide RNA).

[0294] A guide polynucleotide can comprise one or more modifications to provide a nucleic acid with a new or enhanced feature. A guide polynucleotide can comprise a nucleic acid affinity tag. A guide polynucleotide can comprise synthetic nucleotide, synthetic nucleotide analog, nucleotide derivatives, and/or modified nucleotides.

[0295] In some embodiments, a gRNA or a guide polynucleotide can comprise modifications. A modification can be made at any location of a gRNA or a guide polynucleotide. More than one modification can be made to a single gRNA or a guide polynucleotide. A gRNA or a guide polynucleotide can undergo quality control after a modification. In some embodiments, quality control can include PAGE, HPLC, MS, or any combination thereof.

[0296] A modification of a gRNA or a guide polynucleotide can be a substitution, insertion, deletion, chemical modification, physical modification, stabilization, purification, or any combination thereof.

[0297] A gRNA or a guide polynucleotide can also be modified by 5′adenylate, 5′ guanosine-triphosphate cap, 5′N7-Methylguanosine-triphosphate cap, 5′triphosphate cap, 3′phosphate, 3′thiophosphate, 5′phosphate, 5′thiophosphate, Cis-Syn thymidine dimer, trimers, C12 spacer, C3 spacer, C6 spacer, dSpacer, PC spacer, rSpacer, Spacer 18, Spacer 9,3′-3′ modifications, 5′-5′ modifications, abasic, acridine, azobenzene, biotin, biotin BB, biotin TEG, cholesteryl TEG, desthiobiotin TEG, DNP TEG, DNP-X, DOTA, dT-Biotin, dual biotin, PC biotin, psoralen C2, psoralen C6, TINA, 3′DABCYL, black hole quencher 1, black hole quencer 2, DABCYL SE, dT-DABCYL, IRDye QC-1, QSY-21, QSY-35, QSY-7, QSY-9, carboxyl linker, thiol linkers, 2′-deoxyribonucleoside analog purine, 2′-deoxyribonucleoside analog pyrimidine, ribonucleoside analog, 2′-O-methyl ribonucleoside analog, sugar modified analogs, wobble/universal bases, fluorescent dye label, 2′-fluoro RNA, 2′-O-methyl RNA, methylphosphonate, phosphodiester DNA, phosphodiester RNA, phosphothioate DNA, phosphorothioate RNA, UNA, pseudouridine-5′-triphosphate, 5′-methylcytidine-5′-triphosphate, or any combination thereof. In some embodiments, a modification is one or more of 2′-O-methyl (2′-OMe), phosphorothioate (PS), 2′-O-methyl thioPACE (MSP), 2′O-methyl-PACE (MP), 2′-fluoro RNA (2′-F-RNA), and constrained ethyl (S-cEt).

[0298] In some embodiments, a modification is permanent. In other embodiments, a modification is transient. In some embodiments, multiple modifications are made to a gRNA or a guide polynucleotide. A gRNA or a guide polynucleotide modification can alter physiochemical properties of a nucleotide, such as their conformation, polarity, hydrophobicity, chemical reactivity, base-pairing interactions, or any combination thereof.

[0299] A modification can also be a phosphorothioate substitute. In some embodiments, a natural phosphodiester bond can be susceptible to rapid degradation by cellular nucleases and; a modification of internucleotide linkage using phosphorothioate (PS) bond substitutes can be more stable towards hydrolysis by cellular degradation. A modification can increase stability in a gRNA or a guide polynucleotide. A modification can also enhance biological activity. In some embodiments, a phosphorothioate enhanced RNA gRNA can inhibit RNase A, RNase T1, calf serum nucleases, or any combinations thereof. These properties can allow the use of PS-RNA gRNAs to be used in applications where exposure to nucleases is of high probability in vivo or in vitro. For example, phosphorothioate (PS) bonds can be introduced between the last 3-5 nucleotides at the 5′- or ″-end of a gRNA which can inhibit exonuclease degradation. In some embodiments, phosphorothioate bonds can be added throughout an entire gRNA to reduce attack by endonucleases. In some embodiments, the guide RNA is designed to disrupt a splice site (i.e., a splice acceptor (SA) or a splice donor (SD). In some embodiments, the guide RNA is designed such that the base editing results in a premature STOP codon.

### Protospacer Adjacent Motif

[0300] The term “protospacer adjacent motif (PAM)” or PAM-like motif refers to a 2-6 base pair DNA sequence immediately following the DNA sequence targeted by the Cas9 nuclease in the CRISPR bacterial adaptive immune system. In some embodiments, the PAM can be a 5′ PAM (i.e., located upstream of the 5′ end of the protospacer). In other embodiments, the PAM can be a 3′ PAM (i.e., located downstream of the 5′ end of the protospacer). The PAM sequence is essential for target binding, but the exact sequence depends on a type of Cas protein. The PAM sequence can be any PAM sequence known in the art. Suitable PAM sequences include, but are not limited to, NGG, NGA, NGC, NGN, NGT, NGTT, NGCG, NGAG, NGAN, NGNG, NGCN, NGCG, NGTN, NNGRRT, NNNRRT, NNGRR(N), TTTV, TYCV, TYCV, TATV, NNNNGATT, NNAGAAW, or NAAAAC. Y is a pyrimidine; N is any nucleotide base; W is A or T.

[0301] A base editor provided herein can comprise a CRISPR protein-derived domain that is capable of binding a nucleotide sequence that contains a canonical or non-canonical protospacer adjacent motif (PAM) sequence. A PAM site is a nucleotide sequence in proximity to a target polynucleotide sequence. Some aspects of the disclosure provide for base editors comprising all or a portion of CRISPR proteins that have different PAM specificities.

[0302] For example, typically Cas9 proteins, such as Cas9 from S. pyogenes (spCas9), require a canonical NGG PAM sequence to bind a particular nucleic acid region, where the “N” in “NGG” is adenine (A), thymine (T), guanine (G), or cytosine (C), and the G is guanine. A PAM can be CRISPR protein-specific and can be different between different base editors comprising different CRISPR protein-derived domains. A PAM can be 5′ or 3′ of a target sequence. A PAM can be upstream or downstream of a target sequence. A PAM can be 1, 2, 3, 4, 5, 6, 7, 8, 9, 10 or more nucleotides in length. Often, a PAM is between 2-6 nucleotides in length.

[0303] In some embodiments, the PAM is an “NRN” PAM where the “N” in “NRN” is adenine (A), thymine (T), guanine (G), or cytosine (C), and the R is adenine (A) or guanine (G); or the PAM is an “NYN” PAM, wherein the “N” in NYN is adenine (A), thymine (T), guanine (G), or cytosine (C), and the Y is cytidine (C) or thymine (T), for example, as described in R. T. Walton et al., 2020, Science, 10.1126/science.aba8853 (2020), the entire contents of which are incorporated herein by reference.

[0304] Several PAM variants are described in Table 2 below.

TABLE 2
Cas9 proteins and corresponding PAM sequences

| Variant | PAM |
|---|---|
| spCas9 | NGG |
| spCas9-VRQR | NGA |
| spCas9-VRER | NGCG |
| xCas9 (sp) | NGN |
| saCas9 | NNGRRT |
| saCas9-KKH | NNNRRT |
| spCas9-MQKSER | NGCG |
| spCas9-MQKSER | NGCN |
| spCas9-LRKIQK | NGTN |
| spCas9-LRVSQK | NGTN |
| spCas9-LRVSQL | NGTN |
| spCas9-MQKFRAER | NGC |
| Cpf1 | 5′ (TTTV) |
| SpyMac | 5′ -NAA-3′ |

[0305] In some embodiments, the PAM is NGC. In some embodiments, the NGC PAM is recognized by a Cas9 variant. In some embodiments, the NGC PAM variant includes one or more amino acid substitutions selected from D1135M, S1136Q, G1218K, E1219F, A1322R, D1332A, R1335E, and T1337R (collectively termed “MQKFRAER”).

[0306] In some embodiments, the PAM is NGT. In some embodiments, the NGT PAM is recognized by a Cas9 variant. In some embodiments, the NGT PAM variant is generated through targeted mutations at one or more residues 1335, 1337, 1135, 1136, 1218, and/or 1219. In some embodiments, the NGT PAM variant is created through targeted mutations at one or more residues 1219, 1335, 1337, 1218. In some embodiments, the NGT PAM variant is created through targeted mutations at one or more residues 1135, 1136, 1218, 1219, and 1335. In some embodiments, the NGT PAM variant is selected from the set of targeted mutations provided in Tables 3A and 3B below.

TABLE 3A
NGT PAM Variant Mutations at residues 1219, 1335, 1337, 1218

| Variant | E1219V | R1335Q | T1337 | G1218 |
|---|---|---|---|---|
| 1 | F | V | T | |
| 2 | F | V | R | |
| 3 | F | V | Q | |
| 4 | F | V | L | |
| 5 | F | V | T | R |
| 6 | F | V | R | R |
| 7 | F | V | Q | R |
| 8 | F | V | L | R |
| 9 | L | L | T | |
| 10 | L | L | R | |
| 11 | L | L | Q | |
| 12 | L | L | L | |
| 13 | F | I | T | |
| 14 | F | I | R | |
| 15 | F | I | Q | |
| 16 | F | I | L | |
| 17 | F | G | C | |
| 18 | H | L | N | |
| 19 | F | G | C | A |
| 20 | H | L | N | V |
| 21 | L | A | W | |
| 22 | L | A | F | |
| 23 | L | A | Y | |
| 24 | I | A | W | |
| 25 | I | A | F | |
| 26 | I | A | Y | |

TABLE 3B
NGT PAM Variant Mutations at residues 1135, 1136, 1218, 1219,
and 1335

| Variant | D1135L | S1136R | G1218S | E1219V | R1335Q |
|---|---|---|---|---|---|
| 27 | G | | | | |
| 28 | V | | | | |
| 29 | I | | | | |
| 30 | | A | | | |
| 31 | | W | | | |
| 32 | | H | | | |
| 33 | | K | | | |
| 34 | | | K | | |
| 35 | | | R | | |
| 36 | | | Q | | |
| 37 | | | T | | |
| 38 | | | N | | |
| 39 | | | | I | |
| 40 | | | | A | |
| 41 | | | | N | |
| 42 | | | | Q | |
| 43 | | | | G | |
| 44 | | | | L | |
| 45 | | | | S | |
| 46 | | | | T | |
| 47 | | | | | L |
| 48 | | | | | I |
| 49 | | | | | V |
| 50 | | | | | N |
| 51 | | | | | S |
| 52 | | | | | T |
| 53 | | | | | F |
| 54 | | | | | Y |
| 55 | N1286Q | I1331F | | | |

[0307] In some embodiments, the NGT PAM variant is selected from variant 5, 7, 28, 31, or 36 in Table 3A and Table 3B. In some embodiments, the variants have improved NGT PAM recognition.

[0308] In some embodiments, the NGT PAM variants have mutations at residues 1219, 1335, 1337, and/or 1218. In some embodiments, the NGT PAM variant is selected with mutations for improved recognition from the variants provided in Table 4 below.

TABLE 4
NGT PAM Variant Mutations at residues 1219, 1335, 1337, and 1218

| Variant | E1219V | R1335Q | T1337 | G1218 |
|---|---|---|---|---|
| 1 | F | V | T | |
| 2 | F | V | R | |
| 3 | F | V | Q | |
| 4 | F | V | L | |
| 5 | F | V | T | R |
| 6 | F | V | R | R |
| 7 | F | V | Q | R |
| 8 | F | V | L | R |

[0309] In some embodiments, the NGT PAM is selected from the variants provided in Table 5 below.

TABLE 5
NGT PAM variants

| | NGTN | | | | | | | |
|---|---|---|---|---|---|---|---|---|
| | variant | D1135 | S1136 | G1218 | E1219 | A1322R | R1335 | T1337 |
| Variant 1 | LRKIQK | L | R | K | I | — | Q | K |
| Variant 2 | LRSVQK | L | R | S | V | — | Q | K |
| Variant 3 | LRSVQL | L | R | S | V | — | Q | L |
| Variant 4 | LRKIRQK | L | R | K | I | R | Q | K |
| Variant 5 | LRSVRQK | L | R | S | V | R | Q | K |
| Variant 6 | LRSVRQL | L | R | S | V | R | Q | L |

[0310] In some embodiments the NGTN variant is variant 1. In some embodiments, the NGTN variant is variant 2. In some embodiments, the NGTN variant is variant 3. In some embodiments, the NGTN variant is variant 4. In some embodiments, the NGTN variant is variant 5. In some embodiments, the NGTN variant is variant 6.

[0311] In some embodiments, the Cas9 domain is a Cas9 domain from Streptococcus pyogenes (SpCas9). In some embodiments, the SpCas9 domain is a nuclease active SpCas9, a nuclease inactive SpCas9 (SpCas9d), or a SpCas9 nickase (SpCas9n). In some embodiments, the SpCas9 comprises a D9X mutation, or a corresponding mutation in any of the amino acid sequences provided herein, wherein X is any amino acid except for D. In some embodiments, the SpCas9 comprises a D9A mutation, or a corresponding mutation in any of the amino acid sequences provided herein. In some embodiments, the SpCas9 domain, the SpCas9d domain, or the SpCas9n domain can bind to a nucleic acid sequence having a non-canonical PAM. In some embodiments, the SpCas9 domain, the SpCas9d domain, or the SpCas9n domain can bind to a nucleic acid sequence having an NGG, a NGA, or a NGCG PAM sequence.

[0312] In some embodiments, the SpCas9 domain comprises one or more of a D1135X, a R1335X, and a T1337X mutation, or a corresponding mutation in any of the amino acid sequences provided herein, wherein X is any amino acid. In some embodiments, the SpCas9 domain comprises one or more of a D1135E, R1335Q, and T1337R mutation, or a corresponding mutation in any of the amino acid sequences provided herein. In some embodiments, the SpCas9 domain comprises a D1135E, a R1335Q, and a T1337R mutation, or corresponding mutations in any of the amino acid sequences provided herein. In some embodiments, the SpCas9 domain comprises one or more of a D1135X, a R1335X, and a T1337X mutation, or a corresponding mutation in any of the amino acid sequences provided herein, wherein X is any amino acid. In some embodiments, the SpCas9 domain comprises one or more of a D1135V, a R1335Q, and a T1337R mutation, or a corresponding mutation in any of the amino acid sequences provided herein. In some embodiments, the SpCas9 domain comprises a D1135V, a R1335Q, and a T1337R mutation, or corresponding mutations in any of the amino acid sequences provided herein. In some embodiments, the SpCas9 domain comprises one or more of a D1135X, a G1218X, a R1335X, and a T1337X mutation, or a corresponding mutation in any of the amino acid sequences provided herein, wherein X is any amino acid. In some embodiments, the SpCas9 domain comprises one or more of a D1135V, a G1218R, a R1335Q, and a T1337R mutation, or a corresponding mutation in any of the amino acid sequences provided herein. In some embodiments, the SpCas9 domain comprises a D1135V, a G1218R, a R1335Q, and a T1337R mutation, or corresponding mutations in any of the amino acid sequences provided herein.

[0313] In some examples, a PAM recognized by a CRISPR protein-derived domain of a base editor disclosed herein can be provided to a cell on a separate oligonucleotide to an insert (e.g., an AAV insert) encoding the base editor. In such embodiments, providing PAM on a separate oligonucleotide can allow cleavage of a target sequence that otherwise would not be able to be cleaved, because no adjacent PAM is present on the same polynucleotide as the target sequence.

[0314] In an embodiment, S. pyogenes Cas9 (SpCas9) can be used as a CRISPR endonuclease for genome engineering. However, others can be used. In some embodiments, a different endonuclease can be used to target certain genomic targets. In some embodiments, synthetic SpCas9-derived variants with non-NGG PAM sequences can be used. Additionally, other Cas9 orthologues from various species have been identified and these “non-SpCas9s” can bind a variety of PAM sequences that can also be useful for the present disclosure. For example, the relatively large size of SpCas9 (approximately 4 kb coding sequence) can lead to plasmids carrying the SpCas9 cDNA that cannot be efficiently expressed in a cell. Conversely, the coding sequence for Staphylococcus aureus Cas9 (SaCas9) is approximately 1 kilobase shorter than SpCas9, possibly allowing it to be efficiently expressed in a cell. Similar to SpCas9, the SaCas9 endonuclease is capable of modifying target genes in mammalian cells in vitro and in mice in vivo. In some embodiments, a Cas protein can target a different PAM sequence. In some embodiments, a target gene can be adjacent to a Cas9 PAM, 5′-NGG, for example. In other embodiments, other Cas9 orthologs can have different PAM requirements. For example, other PAMs such as those of S. thermophilus (5′-NNAGAA for CRISPR1 and 5′-NGGNG for CRISPR3) and Neisseria meningitidis (5′-NNNNGATT) can also be found adjacent to a target gene.

[0315] In some embodiments, for a S. pyogenes system, a target gene sequence can precede (i.e., be 5′ to) a 5′-NGG PAM, and a 20-nt guide RNA sequence can base pair with an opposite strand to mediate a Cas9 cleavage adjacent to a PAM. In some embodiments, an adjacent cut can be or can be about 3 base pairs upstream of a PAM. In some embodiments, an adjacent cut can be or can be about 10 base pairs upstream of a PAM. In some embodiments, an adjacent cut can be or can be about 0-20 base pairs upstream of a PAM. For example, an adjacent cut can be next to, 1, 2, 3, 4, 5, 6, 7, 8, 9, 10, 11, 12, 13, 14, 15, 16, 17, 18, 19, 20, 21, 22, 23, 24, 25, 26, 27, 28, 29, or 30 base pairs upstream of a PAM. An adjacent cut can also be downstream of a PAM by 1 to 30 base pairs.

[0316] In some embodiments, the Cas9 domain is a recombinant Cas9 domain. In some embodiments, the recombinant Cas9 domain is a SpyMacCas9 domain. In some embodiments, the SpyMacCas9 domain is a nuclease active SpyMacCas9, a nuclease inactive SpyMacCas9 (SpyMacCas9d), or a SpyMacCas9 nickase (SpyMacCas9n). In some embodiments, the SaCas9 domain, the SaCas9d domain, or the SaCas9n domain can bind to a nucleic acid sequence having a non-canonical PAM. In some embodiments, the SpyMacCas9 domain, the SpCas9d domain, or the SpCas9n domain can bind to a nucleic acid sequence having a NAA PAM sequence.

[0317] The sequence of an exemplary Cas9 A homolog of Spy Cas9 in Streptococcus macacae with native 5′-NAAN-3′ PAM specificity is known in the art and described, for example, by Chatterjee, et al., “A Cas9 with PAM recognition for adenine dinucleotides”, Nature Communications, vol. 11, article no. 2474 (2020), and is in the Sequence Listing as SEQ ID NO: 237.

[0318] The sequence of an exemplary Cas9 A homolog of Spy Cas9 in Streptococcus macacae with native 5′-NAAN-3′ PAM specificity is known in the art and described, for example, by Jakimo et al. (biorxiv.org/content/biorxiv/early/2018/09/27/429654.full.pdf), In some embodiments, a variant Cas9 protein harbors, H840A, P475A, W476A, N477A, D1125A, W1126A, and D1218A mutations such that the polypeptide has a reduced ability to cleave a target DNA or RNA. Such a Cas9 protein has a reduced ability to cleave a target DNA (e.g., a single stranded target DNA) but retains the ability to bind a target DNA (e.g., a single stranded target DNA). As another non-limiting example, in some embodiments, the variant Cas9 protein harbors D10A, H840A, P475A, W476A, N477A, D1125A, W1126A, and D1218A mutations such that the polypeptide has a reduced ability to cleave a target DNA. Such a Cas9 protein has a reduced ability to cleave a target DNA (e.g., a single stranded target DNA) but retains the ability to bind a target DNA (e.g., a single stranded target DNA). In some embodiments, when a variant Cas9 protein harbors W476A and W1126A mutations or when the variant Cas9 protein harbors P475A, W476A, N477A, D1125A, W1126A, and D1218A mutations, the variant Cas9 protein does not bind efficiently to a PAM sequence. Thus, in some such cases, when such a variant Cas9 protein is used in a method of binding, the method does not require a PAM sequence. In other words, in some embodiments, when such a variant Cas9 protein is used in a method of binding, the method can include a guide RNA, but the method can be performed in the absence of a PAM sequence (and the specificity of binding is therefore provided by the targeting segment of the guide RNA). Other residues can be mutated to achieve the above effects (i.e., inactivate one or the other nuclease portions). As non-limiting examples, residues D10, G12, G17, E762, H840, N854, N863, H982, H983, A984, D986, and/or A987 can be altered (i.e., substituted). Also, mutations other than alanine substitutions are suitable.

[0319] In some embodiments, a CRISPR protein-derived domain of a base editor can comprise all or a portion of a Cas9 protein with a canonical PAM sequence (NGG). In other embodiments, a Cas9-derived domain of a base editor can employ a non-canonical PAM sequence. Such sequences have been described in the art and would be apparent to the skilled artisan. For example, Cas9 domains that bind non-canonical PAM sequences have been described in Kleinstiver, B. P., et al., “Engineered CRISPR-Cas9 nucleases with altered PAM specificities” Nature 523, 481-485 (2015); and Kleinstiver, B. P., et al., “Broadening the targeting range of Staphylococcus aureus CRISPR-Cas9 by modifying PAM recognition” Nature Biotechnology 33, 1293-1298 (2015); R. T. Walton et al. “Unconstrained genome targeting with near-PAMless engineered CRISPR-Cas9 variants” Science 10.1126/science.aba8853 (2020); Hu et al. “Evolved Cas9 variants with broad PAM compatibility and high DNA specificity,” Nature, 2018 Apr. 5, 556(7699), 57-63; Miller et al., “Continuous evolution of SpCas9 variants compatible with non-G PAMs” Nat. Biotechnol., 2020 April; 38(4):471-481; the entire contents of each are hereby incorporated by reference.

Cas9 Domains with Reduced Exclusivity

[0320] Typically, Cas9 proteins, such as Cas9 from S. pyogenes (spCas9), require a canonical NGG PAM sequence to bind a particular nucleic acid region, where the “N” in “NGG” is adenosine (A), thymidine (T), or cytosine (C), and the G is guanosine. This may limit the ability to edit desired bases within a genome. In some embodiments, the base editing fusion proteins provided herein may need to be placed at a precise location, for example a region comprising a target base that is upstream of the PAM. See e.g., Komor, A. C., et al., “Programmable editing of a target base in genomic DNA without double-stranded DNA cleavage” Nature 533, 420-424 (2016), the entire contents of which are hereby incorporated by reference. Exemplary polypeptide sequences for spCas9 proteins capable of binding a PAM sequence are provided in the Sequence Listing as SEQ ID NOs: 197, 201, and 234-237. Accordingly, in some embodiments, any of the fusion proteins provided herein may contain a Cas9 domain that is capable of binding a nucleotide sequence that does not contain a canonical (e.g., NGG) PAM sequence. Cas9 domains that bind to non-canonical PAM sequences have been described in the art and would be apparent to the skilled artisan. For example, Cas9 domains that bind non-canonical PAM sequences have been described in Kleinstiver, B. P., et al., “Engineered CRISPR-Cas9 nucleases with altered PAM specificities” Nature 523, 481-485 (2015); and Kleinstiver, B. P., et al., “Broadening the targeting range of Staphylococcus aureus CRISPR-Cas9 by modifying PAM recognition” Nature Biotechnology 33, 1293-1298 (2015); the entire contents of each are hereby incorporated by reference.

Fusion Proteins with Internal Insertions

[0321] Provided herein are fusion proteins comprising a heterologous polypeptide fused to a nucleic acid programmable nucleic acid binding protein, for example, a napDNAbp. A heterologous polypeptide can be a polypeptide that is not found in the native or wild-type napDNAbp polypeptide sequence. The heterologous polypeptide can be fused to the napDNAbp at a C-terminal end of the napDNAbp, an N-terminal end of the napDNAbp, or inserted at an internal location of the napDNAbp.

[0322] In some embodiments, the heterologous polypeptide is inserted at an internal location of the napDNAbp. In some embodiments, the heterologous polypeptide is a deaminase (e.g., adenosine deaminase) or a functional fragment thereof. For example, a fusion protein can comprise a deaminase (e.g., adenosine deaminase) flanked by an N-terminal fragment and a C-terminal fragment of a Cas9 polypeptide. The deaminase in a fusion protein can be an adenosine deaminase. In some embodiments, the adenosine deaminase is a TadA (e.g., TadA*7.10 or a variant thereof).

[0323] In some embodiments, the fusion protein comprises the structure:
[0324] NH2-[N-terminal fragment of a napDNAbp]-[deaminase]-[C-terminal fragment of a napDNAbp]-COOH;
[0325] NH2-[N-terminal fragment of a Cas9]-[adenosine deaminase]-[C-terminal fragment of a Cas9]-COOH;
[0326] wherein each instance of “]-[” is an optional linker.

[0327] The deaminase can be a circular permutant deaminase. For example, the deaminase can be a circular permutant adenosine deaminase. In some embodiments, the deaminase is a circular permutant TadA, circularly permutated at amino acid residue 116 as numbered in the TadA reference sequence. In some embodiments, the deaminase is a circular permutant TadA, circularly permutated at amino acid residue 136 as numbered in the TadA reference sequence. In some embodiments, the deaminase is a circular permutant TadA, circularly permutated at amino acid residue 65 as numbered in the TadA reference sequence.

[0328] The fusion protein can comprise more than one deaminase. The fusion protein can comprise, for example, 1, 2, 3, 4, 5 or more deaminases. In some embodiments, the fusion protein comprises one deaminase. In some embodiments, the fusion protein comprises two deaminases. The two or more deaminases in a fusion protein can be an adenosine deaminase, cytidine deaminase, or a combination thereof. The two or more deaminases can be homodimers. The two or more deaminases can be heterodimers. The two or more deaminases can be inserted in tandem in the napDNAbp. In some embodiments, the two or more deaminases may not be in tandem in the napDNAbp.

[0329] In some embodiments, the napDNAbp in the fusion protein is a Cas9 polypeptide or a fragment thereof. The Cas9 polypeptide can be a variant Cas9 polypeptide. In some embodiments, the Cas9 polypeptide is a Cas9 nickase (nCas9) polypeptide or a fragment thereof. In some embodiments, the Cas9 polypeptide is a nuclease dead Cas9 (dCas9) polypeptide or a fragment thereof. The Cas9 polypeptide in a fusion protein can be a full-length Cas9 polypeptide. In some cases, the Cas9 polypeptide in a fusion protein may not be a full length Cas9 polypeptide. The Cas9 polypeptide can be truncated, for example, at a N-terminal or C-terminal end relative to a naturally-occurring Cas9 protein. The Cas9 polypeptide can be a circularly permuted Cas9 protein. The Cas9 polypeptide can be a fragment, a portion, or a domain of a Cas9 polypeptide, that is still capable of binding the target polynucleotide and a guide nucleic acid sequence.

[0330] In some embodiments, the Cas9 polypeptide is a Streptococcus pyogenes Cas9 (SpCas9), Staphylococcus aureus Cas9 (SaCas9), Streptococcus thermophilus 1 Cas9 (St1Cas9), or fragments or variants thereof.

[0331] Fusion proteins comprising a heterologous catalytic domain flanked by N- and C-terminal fragments of a Cas9 polypeptide are also useful for base editing in the methods as described herein. Fusion proteins comprising Cas9 and one or more deaminase domains, e.g., adenosine deaminase, or comprising an adenosine deaminase domain flanked by Cas9 sequences are also useful for highly specific and efficient base editing of target sequences. In an embodiment, a chimeric Cas9 fusion protein contains a heterologous catalytic domain (e.g., adenosine deaminase, cytidine deaminase, or adenosine deaminase and cytidine deaminase) inserted within a Cas9 polypeptide. In some embodiments, the fusion protein comprises an adenosine deaminase domain and a cytidine deaminase domain inserted within a Cas9. In some embodiments, an adenosine deaminase is fused within a Cas9 and a cytidine deaminase is fused to the C-terminus. In some embodiments, an adenosine deaminase is fused within Cas9 and a cytidine deaminase fused to the N-terminus. In some embodiments, a cytidine deaminase is fused within Cas9 and an adenosine deaminase is fused to the C-terminus. In some embodiments, a cytidine deaminase is fused within Cas9 and an adenosine deaminase fused to the N-terminus.

[0332] Exemplary structures of a fusion protein with an adenosine deaminase and a cytidine deaminase and a Cas9 are provided as follows:
[0333] NH₂-[Cas9(adenosine deaminase)]-[cytidine deaminase]-COOH;
[0334] NH₂-[cytidine deaminase]-[Cas9(adenosine deaminase)]-COOH;
[0335] NH₂-[Cas9(cytidine deaminase)]-[adenosine deaminase]-COOH; or
[0336] NH₂-[adenosine deaminase]-[Cas9(cytidine deaminase)]-COOH.

[0337] In some embodiments, the “-” used in the general architecture above indicates the presence of an optional linker.

[0338] In various embodiments, the catalytic domain has DNA modifying activity (e.g., deaminase activity), such as adenosine deaminase activity. In some embodiments, the adenosine deaminase is a TadA (e.g., TadA*7.10). In some embodiments, the TadA is a TadA variant. In some embodiments, a TadA variant is fused within Cas9 and a cytidine deaminase is fused to the C-terminus. In some embodiments, a TadA variant is fused within Cas9 and a cytidine deaminase fused to the N-terminus. In some embodiments, a cytidine deaminase is fused within Cas9 and a TadA variant is fused to the C-terminus. In some embodiments, a cytidine deaminase is fused within Cas9 and a TadA variant fused to the N-terminus. Exemplary structures of a fusion protein with a TadA variant and a cytidine deaminase and a Cas9 are provided as follows:
[0339] NH₂-[Cas9(TadA variant)]-[cytidine deaminase]-COOH;
[0340] NH₂-[cytidine deaminase]-[Cas9(TadA variant)]-COOH;
[0341] NH₂-[Cas9(cytidine deaminase)]-[TadA variant]-COOH; or
[0342] NH₂-[TadA variant]-[Cas9(cytidine deaminase)]-COOH.

[0343] In some embodiments, the “-” used in the general architecture above indicates the presence of an optional linker.

[0344] In other embodiments, the fusion protein contains one or more catalytic domains. In other embodiments, at least one of the one or more catalytic domains is inserted within the Cas12 polypeptide or is fused at the Cas12 N-terminus or C-terminus. In other embodiments, at least one of the one or more catalytic domains is inserted within a loop, an alpha helix region, an unstructured portion, or a solvent accessible portion of the Cas12 polypeptide. In other embodiments, the Cas12 polypeptide is Cas12a, Cas12b, Cas12c, Cas12d, Cas12e, Cas12g, Cas12h, Cas12i, or Cas12j/CasΦ. In other embodiments, the Cas12 polypeptide has at least about 85% amino acid sequence identity to Bacillus hisashii Cas12b, Bacillus thermoamylovorans Cas12b, Bacillus sp. V3-13 Cas12b, or Alicyclobacillus acidiphilus Cas12b (SEQ ID NO: 254). In other embodiments, the Cas12 polypeptide has at least about 90% amino acid sequence identity to Bacillus hisashii Cas12b (SEQ ID NO: 255), Bacillus thermoamylovorans Cas12b, Bacillus sp. V3-13 Cas12b, or Alicyclobacillus acidiphilus Cas12b. In other embodiments, the Cas12 polypeptide has at least about 95% amino acid sequence identity to Bacillus hisashii Cas12b, Bacillus thermoamylovorans Cas12b (SEQ ID NO: 256), Bacillus sp. V3-13 Cas12b (SEQ ID NO: 257), or Alicyclobacillus acidiphilus Cas12b.

[0345] In other embodiments, the Cas12 polypeptide contains or consists essentially of a fragment of Bacillus hisashii Cas12b, Bacillus thermoamylovorans Cas12b, Bacillus sp. V3-13 Cas12b, or Alicyclobacillus acidiphilus Cas12b. In embodiments, the Cas12 polypeptide contains BvCas12b (V4), which in some embodiments is expressed as 5′ mRNA Cap-5′ UTR-bhCas12b-STOP sequence-3′ UTR-120polyA tail (SEQ ID NOs: 258-260).

[0346] In other embodiments, the catalytic domain is inserted between amino acid positions 153-154, 255-256, 306-307, 980-981, 1019-1020, 534-535, 604-605, or 344-345 of BhCas12b or a corresponding amino acid residue of Cas12a, Cas12c, Cas12d, Cas12e, Cas12g, Cas12h, Cas12i, or Cas12j/CasΦ. In other embodiments, the catalytic domain is inserted between amino acids P153 and S154 of BhCas12b. In other embodiments, the catalytic domain is inserted between amino acids K255 and E256 of BhCas12b. In other embodiments, the catalytic domain is inserted between amino acids D980 and G981 of BhCas12b. In other embodiments, the catalytic domain is inserted between amino acids K1019 and L1020 of BhCas12b. In other embodiments, the catalytic domain is inserted between amino acids F534 and P535 of BhCas12b. In other embodiments, the catalytic domain is inserted between amino acids K604 and G605 of BhCas12b. In other embodiments, the catalytic domain is inserted between amino acids H344 and F345 of BhCas12b. In other embodiments, catalytic domain is inserted between amino acid positions 147 and 148, 248 and 249, 299 and 300, 991 and 992, or 1031 and 1032 of BvCas12b or a corresponding amino acid residue of Cas12a, Cas12c, Cas12d, Cas12e, Cas12g, Cas12h, Cas12i, or Cas12j/CasΦ. In other embodiments, the catalytic domain is inserted between amino acids P147 and D148 of BvCas12b. In other embodiments, the catalytic domain is inserted between amino acids G248 and G249 of BvCas12b. In other embodiments, the catalytic domain is inserted between amino acids P299 and E300 of BvCas12b. In other embodiments, the catalytic domain is inserted between amino acids G991 and E992 of BvCas12b. In other embodiments, the catalytic domain is inserted between amino acids K1031 and M1032 of BvCas12b. In other embodiments, the catalytic domain is inserted between amino acid positions 157 and 158, 258 and 259, 310 and 311, 1008 and 1009, or 1044 and 1045 of AaCas12b or a corresponding amino acid residue of Cas12a, Cas12c, Cas12d, Cas12e, Cas12g, Cas12h, Cas12i, or Cas12j/CasΦ. In other embodiments, the catalytic domain is inserted between amino acids P157 and G158 of AaCas12b. In other embodiments, the catalytic domain is inserted between amino acids V258 and G259 of AaCas12b. In other embodiments, the catalytic domain is inserted between amino acids D310 and P311 of AaCas12b. In other embodiments, the catalytic domain is inserted between amino acids G1008 and E1009 of AaCas12b. In other embodiments, the catalytic domain is inserted between amino acids G1044 and K1045 at of AaCas12b.

[0347] In other embodiments, the fusion protein contains a nuclear localization signal (e.g., a bipartite nuclear localization signal). In other embodiments, the amino acid sequence of the nuclear localization signal is MAPKKKRKVGIHGVPAA (SEQ ID NO: 261). In other embodiments of the above aspects, the nuclear localization signal is encoded by the following sequence:

[0348] ATGGCCCCAAAGAAGAAGCGGAAGGTCGGTATCCACGGAGTCCCAGCAGCC (SEQ ID NO: 262). In other embodiments, the Cas12b polypeptide contains a mutation that silences the catalytic activity of a RuvC domain. In other embodiments, the Cas12b polypeptide contains D574A, D829A and/or D952A mutations. In other embodiments, the fusion protein further contains a tag (e.g., an influenza hemagglutinin tag).

[0349] In some embodiments, the fusion protein comprises a napDNAbp domain (e.g., Cas12-derived domain) with an internally fused nucleobase editing domain (e.g., all or a portion of a deaminase domain, e.g., an adenosine deaminase domain). In some embodiments, the napDNAbp is a Cas12b.

[0350] By way of nonlimiting example, an adenosine deaminase (e.g., TadA*8.13) may be inserted into a BhCas12b to produce a fusion protein (e.g., TadA*8.13-BhCas12b) that effectively edits a nucleic acid sequence.

[0351] In some embodiments, the base editing system described herein is an ABE with TadA inserted into a Cas9. Polypeptide sSequences of relevant ABEs with TadA inserted into a Cas9 are provided in the attached Ssequence Llisting as SEQ ID NOs: 263-308.

[0352] In some embodiments, adenosine base editors were generated to insert TadA or variants thereof into the Cas9 polypeptide at the identified positions.

[0353] Exemplary, yet nonlimiting, fusion proteins are described in International PCT Application Nos. PCT/US2020/016285 and U.S. Provisional Application Nos. 62/852,228 and 62/852,224, the contents of which are incorporated by reference herein in their entireties.

[0354] The heterologous polypeptide (e.g., deaminase) can be inserted in the napDNAbp (e.g., Cas9) at a suitable location, for example, such that the napDNAbp retains its ability to bind the target polynucleotide and a guide nucleic acid. A deaminase (e.g., adenosine deaminase, cytidine deaminase, or adenosine deaminase and cytidine deaminase) can be inserted into a napDNAbp without compromising function of the deaminase (e.g., base editing activity) or the napDNAbp (e.g., ability to bind to target nucleic acid and guide nucleic acid). A deaminase (e.g., adenosine deaminase, cytidine deaminase, or adenosine deaminase and cytidine deaminase) can be inserted in the napDNAbp at, for example, a disordered region or a region comprising a high temperature factor or B-factor as shown by crystallographic studies. Regions of a protein that are less ordered, disordered, or unstructured, for example solvent exposed regions and loops, can be used for insertion without compromising structure or function. A deaminase (e.g., adenosine deaminase, cytidine deaminase, or adenosine deaminase and cytidine deaminase) can be inserted in the napDNAbp in a flexible loop region or a solvent-exposed region. In some embodiments, the deaminase (e.g., adenosine deaminase, cytidine deaminase, or adenosine deaminase and cytidine deaminase) is inserted in a flexible loop of the Cas9 polypeptide.

[0355] In some embodiments, the insertion location of a deaminase (e.g., adenosine deaminase, cytidine deaminase, or adenosine deaminase and cytidine deaminase) is determined by B-factor analysis of the crystal structure of Cas9 polypeptide. In some embodiments, the deaminase (e.g., adenosine deaminase, cytidine deaminase, or adenosine deaminase and cytidine deaminase) is inserted in regions of the Cas9 polypeptide comprising higher than average B-factors (e.g., higher B factors compared to the total protein or the protein domain comprising the disordered region). B-factor or temperature factor can indicate the fluctuation of atoms from their average position (for example, as a result of temperature-dependent atomic vibrations or static disorder in a crystal lattice). A high B-factor (e.g., higher than average B-factor) for backbone atoms can be indicative of a region with relatively high local mobility. Such a region can be used for inserting a deaminase without compromising structure or function. A deaminase (e.g., adenosine deaminase, cytidine deaminase, or adenosine deaminase and cytidine deaminase) can be inserted at a location with a residue having a Ca atom with a B-factor that is 50%, 60%, 70%, 80%, 90%, 100%, 110%, 120%, 130%, 140%, 150%, 160%, 170%, 180%, 190%, 200%, or greater than 200% more than the average B-factor for the total protein. A deaminase (e.g., adenosine deaminase, cytidine deaminase, or adenosine deaminase and cytidine deaminase) can be inserted at a location with a residue having a Ca atom with a B-factor that is 50%, 60%, 70%, 80%, 90%, 100%, 110%, 120%, 130%, 140%, 150%, 160%, 170%, 180%, 190%, 200% or greater than 200% more than the average B-factor for a Cas9 protein domain comprising the residue. Cas9 polypeptide positions comprising a higher than average B-factor can include, for example, residues 768, 792, 1052, 1015, 1022, 1026, 1029, 1067, 1040, 1054, 1068, 1246, 1247, and 1248 as numbered in the above Cas9 reference sequence. Cas9 polypeptide regions comprising a higher than average B-factor can include, for example, residues 792-872, 792-906, and 2-791 as numbered in the above Cas9 reference sequence.

[0356] A heterologous polypeptide (e.g., deaminase) can be inserted in the napDNAbp at an amino acid residue selected from the group consisting of: 768, 791, 792, 1015, 1016, 1022, 1023, 1026, 1029, 1040, 1052, 1054, 1067, 1068, 1069, 1246, 1247, and 1248 as numbered in the above Cas9 reference sequence, or a corresponding amino acid residue in another Cas9 polypeptide. In some embodiments, the heterologous polypeptide is inserted between amino acid positions 768-769, 791-792, 792-793, 1015-1016, 1022-1023, 1026-1027, 1029-1030, 1040-1041, 1052-1053, 1054-1055, 1067-1068, 1068-1069, 1247-1248, or 1248-1249 as numbered in the above Cas9 reference sequence or corresponding amino acid positions thereof. In some embodiments, the heterologous polypeptide is inserted between amino acid positions 769-770, 792-793, 793-794, 1016-1017, 1023-1024, 1027-1028, 1030-1031, 1041-1042, 1053-1054, 1055-1056, 1068-1069, 1069-1070, 1248-1249, or 1249-1250 as numbered in the above Cas9 reference sequence or corresponding amino acid positions thereof. In some embodiments, the heterologous polypeptide replaces an amino acid residue selected from the group consisting of: 768, 791, 792, 1015, 1016, 1022, 1023, 1026, 1029, 1040, 1052, 1054, 1067, 1068, 1069, 1246, 1247, and 1248 as numbered in the above Cas9 reference sequence, or a corresponding amino acid residue in another Cas9 polypeptide. It should be understood that the reference to the above Cas9 reference sequence with respect to insertion positions is for illustrative purposes. The insertions as discussed herein are not limited to the Cas9 polypeptide sequence of the above Cas9 reference sequence, but include insertion at corresponding locations in variant Cas9 polypeptides, for example a Cas9 nickase (nCas9), nuclease dead Cas9 (dCas9), a Cas9 variant lacking a nuclease domain, a truncated Cas9, or a Cas9 domain lacking partial or complete HNH domain.

[0357] A heterologous polypeptide (e.g., deaminase) can be inserted in the napDNAbp at an amino acid residue selected from the group consisting of: 768, 792, 1022, 1026, 1040, 1068, and 1247 as numbered in the above Cas9 reference sequence, or a corresponding amino acid residue in another Cas9 polypeptide. In some embodiments, the heterologous polypeptide is inserted between amino acid positions 768-769, 792-793, 1022-1023, 1026-1027, 1029-1030, 1040-1041, 1068-1069, or 1247-1248 as numbered in the above Cas9 reference sequence or corresponding amino acid positions thereof. In some embodiments, the heterologous polypeptide is inserted between amino acid positions 769-770, 793-794, 1023-1024, 1027-1028, 1030-1031, 1041-1042, 1069-1070, or 1248-1249 as numbered in the above Cas9 reference sequence or corresponding amino acid positions thereof. In some embodiments, the heterologous polypeptide replaces an amino acid residue selected from the group consisting of: 768, 792, 1022, 1026, 1040, 1068, and 1247 as numbered in the above Cas9 reference sequence, or a corresponding amino acid residue in another Cas9 polypeptide.

[0358] A heterologous polypeptide (e.g., deaminase) can be inserted in the napDNAbp at an amino acid residue as described herein, or a corresponding amino acid residue in another Cas9 polypeptide. In an embodiment, a heterologous polypeptide (e.g., deaminase) can be inserted in the napDNAbp at an amino acid residue selected from the group consisting of: 1002, 1003, 1025, 1052-1056, 1242-1247, 1061-1077, 943-947, 686-691, 569-578, 530-539, and 1060-1077 as numbered in the above Cas9 reference sequence, or a corresponding amino acid residue in another Cas9 polypeptide. The deaminase (e.g., adenosine deaminase, cytidine deaminase, or adenosine deaminase and cytidine deaminase) can be inserted at the N-terminus or the C-terminus of the residue or replace the residue. In some embodiments, the deaminase (e.g., adenosine deaminase, cytidine deaminase, or adenosine deaminase and cytidine deaminase) is inserted at the C-terminus of the residue.

[0359] In some embodiments, an adenosine deaminase (e.g., TadA) is inserted at an amino acid residue selected from the group consisting of: 1015, 1022, 1029, 1040, 1068, 1247, 1054, 1026, 768, 1067, 1248, 1052, and 1246 as numbered in the above Cas9 reference sequence, or a corresponding amino acid residue in another Cas9 polypeptide. In some embodiments, an adenosine deaminase (e.g., TadA) is inserted in place of residues 792-872, 792-906, or 2-791 as numbered in the above Cas9 reference sequence, or a corresponding amino acid residue in another Cas9 polypeptide. In some embodiments, the adenosine deaminase is inserted at the N-terminus of an amino acid selected from the group consisting of: 1015, 1022, 1029, 1040, 1068, 1247, 1054, 1026, 768, 1067, 1248, 1052, and 1246 as numbered in the above Cas9 reference sequence, or a corresponding amino acid residue in another Cas9 polypeptide. In some embodiments, the adenosine deaminase is inserted at the C-terminus of an amino acid selected from the group consisting of: 1015, 1022, 1029, 1040, 1068, 1247, 1054, 1026, 768, 1067, 1248, 1052, and 1246 as numbered in the above Cas9 reference sequence, or a corresponding amino acid residue in another Cas9 polypeptide. In some embodiments, the adenosine deaminase is inserted to replace an amino acid selected from the group consisting of: 1015, 1022, 1029, 1040, 1068, 1247, 1054, 1026, 768, 1067, 1248, 1052, and 1246 as numbered in the above Cas9 reference sequence, or a corresponding amino acid residue in another Cas9 polypeptide.

[0360] In some embodiments, the deaminase (e.g., adenosine deaminase, cytidine deaminase, or adenosine deaminase and cytidine deaminase) is inserted at amino acid residue 768 as numbered in the above Cas9 reference sequence, or a corresponding amino acid residue in another Cas9 polypeptide. In some embodiments, the deaminase (e.g., adenosine deaminase, cytidine deaminase, or adenosine deaminase and cytidine deaminase) is inserted at the N-terminus of amino acid residue 768 as numbered in the above Cas9 reference sequence, or a corresponding amino acid residue in another Cas9 polypeptide. In some embodiments, the deaminase (e.g., adenosine deaminase, cytidine deaminase, or adenosine deaminase and cytidine deaminase) is inserted at the C-terminus of amino acid residue 768 as numbered in the above Cas9 reference sequence, or a corresponding amino acid residue in another Cas9 polypeptide. In some embodiments, the deaminase (e.g., adenosine deaminase, cytidine deaminase, or adenosine deaminase and cytidine deaminase) is inserted to replace amino acid residue 768 as numbered in the above Cas9 reference sequence, or a corresponding amino acid residue in another Cas9 polypeptide.

[0361] In some embodiments, the deaminase (e.g., adenosine deaminase) is inserted at amino acid residue 791 or is inserted at amino acid residue 792, as numbered in the above Cas9 reference sequence, or a corresponding amino acid residue in another Cas9 polypeptide. In some embodiments, the deaminase (e.g., adenosine deaminase) is inserted at the N-terminus of amino acid residue 791 or is inserted at the N-terminus of amino acid 792, as numbered in the above Cas9 reference sequence, or a corresponding amino acid residue in another Cas9 polypeptide. In some embodiments, the deaminase (e.g., adenosine deaminase) is inserted at the C-terminus of amino acid 791 or is inserted at the N-terminus of amino acid 792, as numbered in the above Cas9 reference sequence, or a corresponding amino acid residue in another Cas9 polypeptide. In some embodiments, the deaminase (e.g., adenosine deaminase) is inserted to replace amino acid 791, or is inserted to replace amino acid 792, as numbered in the above Cas9 reference sequence, or a corresponding amino acid residue in another Cas9 polypeptide.

[0362] In some embodiments, the deaminase (e.g., adenosine deaminase) is inserted at amino acid residue 1016 as numbered in the above Cas9 reference sequence, or a corresponding amino acid residue in another Cas9 polypeptide. In some embodiments, the deaminase (e.g., adenosine deaminase) is inserted at the N-terminus of amino acid residue 1016 as numbered in the above Cas9 reference sequence, or a corresponding amino acid residue in another Cas9 polypeptide. In some embodiments, the deaminase (e.g., adenosine deaminase) is inserted at the C-terminus of amino acid residue 1016 as numbered in the above Cas9 reference sequence, or a corresponding amino acid residue in another Cas9 polypeptide. In some embodiments, the deaminase (e.g., adenosine deaminase) is inserted to replace amino acid residue 1016 as numbered in the above Cas9 reference sequence, or a corresponding amino acid residue in another Cas9 polypeptide.

[0363] In some embodiments, the deaminase (e.g., adenosine deaminase) is inserted at amino acid residue 1022, or is inserted at amino acid residue 1023, as numbered in the above Cas9 reference sequence, or a corresponding amino acid residue in another Cas9 polypeptide. In some embodiments, the deaminase (e.g., adenosine deaminase) is inserted at the N-terminus of amino acid residue 1022 or is inserted at the N-terminus of amino acid residue 1023, as numbered in the above Cas9 reference sequence, or a corresponding amino acid residue in another Cas9 polypeptide. In some embodiments, the deaminase (e.g., adenosine deaminase) is inserted at the C-terminus of amino acid residue 1022 or is inserted at the C-terminus of amino acid residue 1023, as numbered in the above Cas9 reference sequence, or a corresponding amino acid residue in another Cas9 polypeptide. In some embodiments, the deaminase (e.g., adenosine deaminase) is inserted to replace amino acid residue 1022, or is inserted to replace amino acid residue 1023, as numbered in the above Cas9 reference sequence, or a corresponding amino acid residue in another Cas9 polypeptide.

[0364] In some embodiments, the deaminase (e.g., adenosine deaminase) is inserted at amino acid residue 1026, or is inserted at amino acid residue 1029, as numbered in the above Cas9 reference sequence, or a corresponding amino acid residue in another Cas9 polypeptide. In some embodiments, the deaminase (e.g., adenosine deaminase) is inserted at the N-terminus of amino acid residue 1026 or is inserted at the N-terminus of amino acid residue 1029, as numbered in the above Cas9 reference sequence, or a corresponding amino acid residue in another Cas9 polypeptide. In some embodiments, the deaminase (e.g., adenosine deaminase) is inserted at the C-terminus of amino acid residue 1026 or is inserted at the C-terminus of amino acid residue 1029, as numbered in the above Cas9 reference sequence, or a corresponding amino acid residue in another Cas9 polypeptide. In some embodiments, the deaminase (e.g., adenosine deaminase) is inserted to replace amino acid residue 1026, or is inserted to replace amino acid residue 1029, as numbered in the above Cas9 reference sequence, or corresponding amino acid residue in another Cas9 polypeptide.

[0365] In some embodiments, the deaminase (e.g., adenosine deaminase) is inserted at amino acid residue 1040 as numbered in the above Cas9 reference sequence, or a corresponding amino acid residue in another Cas9 polypeptide. In some embodiments, the deaminase (e.g., adenosine deaminase,) is inserted at the N-terminus of amino acid residue 1040 as numbered in the above Cas9 reference sequence, or a corresponding amino acid residue in another Cas9 polypeptide. In some embodiments, the deaminase (e.g., adenosine deaminase) is inserted at the C-terminus of amino acid residue 1040 as numbered in the above Cas9 reference sequence, or a corresponding amino acid residue in another Cas9 polypeptide. In some embodiments, the deaminase (e.g., adenosine deaminase) is inserted to replace amino acid residue 1040 as numbered in the above Cas9 reference sequence, or a corresponding amino acid residue in another Cas9 polypeptide.

[0366] In some embodiments, the deaminase (e.g., adenosine deaminase) is inserted at amino acid residue 1052, or is inserted at amino acid residue 1054, as numbered in the above Cas9 reference sequence, or a corresponding amino acid residue in another Cas9 polypeptide. In some embodiments, the deaminase (e.g., adenosine deaminase, cytidine deaminase, or adenosine deaminase and cytidine deaminase) is inserted at the N-terminus of amino acid residue 1052 or is inserted at the N-terminus of amino acid residue 1054, as numbered in the above Cas9 reference sequence, or a corresponding amino acid residue in another Cas9 polypeptide. In some embodiments, the deaminase (e.g., adenosine deaminase) is inserted at the C-terminus of amino acid residue 1052 or is inserted at the C-terminus of amino acid residue 1054, as numbered in the above Cas9 reference sequence, or a corresponding amino acid residue in another Cas9 polypeptide. In some embodiments, the deaminase (e.g., adenosine deaminase) is inserted to replace amino acid residue 1052, or is inserted to replace amino acid residue 1054, as numbered in the above Cas9 reference sequence, or a corresponding amino acid residue in another Cas9 polypeptide.

[0367] In some embodiments, the deaminase (e.g., adenosine deaminase) is inserted at amino acid residue 1067, or is inserted at amino acid residue 1068, or is inserted at amino acid residue 1069, as numbered in the above Cas9 reference sequence, or a corresponding amino acid residue in another Cas9 polypeptide. In some embodiments, the deaminase (e.g., adenosine deaminase) is inserted at the N-terminus of amino acid residue 1067 or is inserted at the N-terminus of amino acid residue 1068 or is inserted at the N-terminus of amino acid residue 1069, as numbered in the above Cas9 reference sequence, or a corresponding amino acid residue in another Cas9 polypeptide. In some embodiments, the deaminase (e.g., adenosine deaminase) is inserted at the C-terminus of amino acid residue 1067 or is inserted at the C-terminus of amino acid residue 1068 or is inserted at the C-terminus of amino acid residue 1069, as numbered in the above Cas9 reference sequence, or a corresponding amino acid residue in another Cas9 polypeptide. In some embodiments, the deaminase (e.g., adenosine deaminase) is inserted to replace amino acid residue 1067, or is inserted to replace amino acid residue 1068, or is inserted to replace amino acid residue 1069, as numbered in the above Cas9 reference sequence, or a corresponding amino acid residue in another Cas9 polypeptide.

[0368] In some embodiments, the deaminase (e.g., adenosine deaminase) is inserted at amino acid residue 1246, or is inserted at amino acid residue 1247, or is inserted at amino acid residue 1248, as numbered in the above Cas9 reference sequence, or a corresponding amino acid residue in another Cas9 polypeptide. In some embodiments, the deaminase (e.g., adenosine deaminase) is inserted at the N-terminus of amino acid residue 1246 or is inserted at the N-terminus of amino acid residue 1247 or is inserted at the N-terminus of amino acid residue 1248, as numbered in the above Cas9 reference sequence, or a corresponding amino acid residue in another Cas9 polypeptide. In some embodiments, the deaminase (e.g., adenosine deaminase is inserted at the C-terminus of amino acid residue 1246 or is inserted at the C-terminus of amino acid residue 1247 or is inserted at the C-terminus of amino acid residue 1248, as numbered in the above Cas9 reference sequence, or a corresponding amino acid residue in another Cas9 polypeptide. In some embodiments, the deaminase (e.g., adenosine deaminase) is inserted to replace amino acid residue 1246, or is inserted to replace amino acid residue 1247, or is inserted to replace amino acid residue 1248, as numbered in the above Cas9 reference sequence, or a corresponding amino acid residue in another Cas9 polypeptide.

[0369] In some embodiments, a heterologous polypeptide (e.g., deaminase) is inserted in a flexible loop of a Cas9 polypeptide. The flexible loop portions can be selected from the group consisting of 530-537, 569-570, 686-691, 943-947, 1002-1025, 1052-1077, 1232-1247, or 1298-1300 as numbered in the above Cas9 reference sequence, or a corresponding amino acid residue in another Cas9 polypeptide. The flexible loop portions can be selected from the group consisting of: 1-529, 538-568, 580-685, 692-942, 948-1001, 1026-1051, 1078-1231, or 1248-1297 as numbered in the above Cas9 reference sequence, or a corresponding amino acid residue in another Cas9 polypeptide.

[0370] A heterologous polypeptide (e.g., adenine deaminase) can be inserted into a Cas9 polypeptide region corresponding to amino acid residues: 1017-1069, 1242-1247, 1052-1056, 1060-1077, 1002-1003, 943-947, 530-537, 568-579, 686-691, 1242-1247, 1298-1300, 1066-1077, 1052-1056, or 1060-1077 as numbered in the above Cas9 reference sequence, or a corresponding amino acid residue in another Cas9 polypeptide.

[0371] A heterologous polypeptide (e.g., adenine deaminase) can be inserted in place of a deleted region of a Cas9 polypeptide. The deleted region can correspond to an N-terminal or C-terminal portion of the Cas9 polypeptide. In some embodiments, the deleted region corresponds to residues 792-872 as numbered in the above Cas9 reference sequence, or a corresponding amino acid residue in another Cas9 polypeptide. In some embodiments, the deleted region corresponds to residues 792-906 as numbered in the above Cas9 reference sequence, or a corresponding amino acid residue in another Cas9 polypeptide. In some embodiments, the deleted region corresponds to residues 2-791 as numbered in the above Cas9 reference sequence, or a corresponding amino acid residue in another Cas9 polypeptide. In some embodiments, the deleted region corresponds to residues 1017-1069 as numbered in the above Cas9 reference sequence, or corresponding amino acid residues thereof.

[0372] Exemplary internal fusions base editors are provided in Table 6 below:

TABLE 6
Insertion loci in Cas9 proteins

| BE ID | Modification | Other ID |
|---|---|---|
| IBE001 | Cas9 TadA ins 1015 | ISLAY01 |
| IBE002 | Cas9 TadA ins 1022 | ISLAY02 |
| IBE003 | Cas9 TadA ins 1029 | ISLAY03 |
| IBE004 | Cas9 TadA ins 1040 | ISLAY04 |
| IBE005 | Cas9 TadA ins 1068 | ISLAY05 |
| IBE006 | Cas9 TadA ins 1247 | ISLAY06 |
| IBE007 | Cas9 TadA ins 1054 | ISLAY07 |
| IBE008 | Cas9 TadA ins 1026 | ISLAY08 |
| IBE009 | Cas9 TadA ins 768 | ISLAY09 |
| IBE020 | delta HNH TadA 792 | ISLAY20 |
| IBE021 | N-term fusion single TadA helix truncated 165-end | ISLAY21 |
| IBE029 | TadA-Circular Permutant 116 ins 1067 | ISLAY29 |
| IBE031 | TadA-Circular Permutant 136 ins 1248 | ISLAY31 |
| IBE032 | TadA-Circular Permutant 136 ins 1052 | ISLAY32 |
| IBE035 | delta 792-872 TadA ins | ISLAY35 |
| IBE036 | delta 792-906 TadA ins | ISLAY36 |
| IBE043 | TadA-Circular Permutant 65 ins 1246 | ISLAY43 |
| IBE044 | TadA ins C-term truncate2 791 | ISLAY44 |

[0373] A heterologous polypeptide (e.g., deaminase) can be inserted within a structural or functional domain of a Cas9 polypeptide. A heterologous polypeptide (e.g., deaminase) can be inserted between two structural or functional domains of a Cas9 polypeptide. A heterologous polypeptide (e.g., deaminase) can be inserted in place of a structural or functional domain of a Cas9 polypeptide, for example, after deleting the domain from the Cas9 polypeptide. The structural or functional domains of a Cas9 polypeptide can include, for example, RuvC I, RuvC II, RuvC III, Rec1, Rec2, PI, or HNH.

[0374] In some embodiments, the Cas9 polypeptide lacks one or more domains selected from the group consisting of: RuvC I, RuvC II, RuvC III, Rec1, Rec2, PI, or HNH domain. In some embodiments, the Cas9 polypeptide lacks a nuclease domain. In some embodiments, the Cas9 polypeptide lacks an HNH domain. In some embodiments, the Cas9 polypeptide lacks a portion of the HNH domain such that the Cas9 polypeptide has reduced or abolished HNH activity. In some embodiments, the Cas9 polypeptide comprises a deletion of the nuclease domain, and the deaminase is inserted to replace the nuclease domain. In some embodiments, the HNH domain is deleted and the deaminase is inserted in its place. In some embodiments, one or more of the RuvC domains is deleted and the deaminase is inserted in its place.

[0375] A fusion protein comprising a heterologous polypeptide can be flanked by a N-terminal and a C-terminal fragment of a napDNAbp. In some embodiments, the fusion protein comprises a deaminase flanked by a N-terminal fragment and a C-terminal fragment of a Cas9 polypeptide. The N terminal fragment or the C terminal fragment can bind the target polynucleotide sequence. The C-terminus of the N terminal fragment or the N-terminus of the C terminal fragment can comprise a part of a flexible loop of a Cas9 polypeptide. The C-terminus of the N terminal fragment or the N-terminus of the C terminal fragment can comprise a part of an alpha-helix structure of the Cas9 polypeptide. The N-terminal fragment or the C-terminal fragment can comprise a DNA binding domain. The N-terminal fragment or the C-terminal fragment can comprise a RuvC domain. The N-terminal fragment or the C-terminal fragment can comprise an HNH domain. In some embodiments, neither of the N-terminal fragment and the C-terminal fragment comprises an HNH domain.

[0376] In some embodiments, the C-terminus of the N terminal Cas9 fragment comprises an amino acid that is in proximity to a target nucleobase when the fusion protein deaminates the target nucleobase. In some embodiments, the N-terminus of the C terminal Cas9 fragment comprises an amino acid that is in proximity to a target nucleobase when the fusion protein deaminates the target nucleobase. The insertion location of different deaminases can be different in order to have proximity between the target nucleobase and an amino acid in the C-terminus of the N terminal Cas9 fragment or the N-terminus of the C terminal Cas9 fragment. For example, the insertion position of a deaminase can be at an amino acid residue selected from the group consisting of: 1015, 1022, 1029, 1040, 1068, 1247, 1054, 1026, 768, 1067, 1248, 1052, and 1246 as numbered in the above Cas9 reference sequence, or a corresponding amino acid residue in another Cas9 polypeptide.

[0377] The N-terminal Cas9 fragment of a fusion protein (i.e. the N-terminal Cas9 fragment flanking the deaminase in a fusion protein) can comprise the N-terminus of a Cas9 polypeptide. The N-terminal Cas9 fragment of a fusion protein can comprise a length of at least about: 100, 200, 300, 400, 500, 600, 700, 800, 900, 1000, 1100, 1200, or 1300 amino acids. The N-terminal Cas9 fragment of a fusion protein can comprise a sequence corresponding to amino acid residues: 1-56, 1-95, 1-200, 1-300, 1-400, 1-500, 1-600, 1-700, 1-718, 1-765, 1-780, 1-906, 1-918, or 1-1100 as numbered in the above Cas9 reference sequence, or a corresponding amino acid residue in another Cas9 polypeptide. The N-terminal Cas9 fragment can comprise a sequence comprising at least: 85%, at least 90%, at least 91%, at least 92%, at least 93%, at least 94%, at least 95%, at least 96%, at least 97%, at least 98%, at least 99%, or at least 99.5% sequence identity to amino acid residues: 1-56, 1-95, 1-200, 1-300, 1-400, 1-500, 1-600, 1-700, 1-718, 1-765, 1-780, 1-906, 1-918, or 1-1100 as numbered in the above Cas9 reference sequence, or a corresponding amino acid residue in another Cas9 polypeptide.

[0378] The C-terminal Cas9 fragment of a fusion protein (i.e. the C-terminal Cas9 fragment flanking the deaminase in a fusion protein) can comprise the C-terminus of a Cas9 polypeptide. The C-terminal Cas9 fragment of a fusion protein can comprise a length of at least about: 100, 200, 300, 400, 500, 600, 700, 800, 900, 1000, 1100, 1200, or 1300 amino acids. The C-terminal Cas9 fragment of a fusion protein can comprise a sequence corresponding to amino acid residues: 1099-1368, 918-1368, 906-1368, 780-1368, 765-1368, 718-1368, 94-1368, or 56-1368 as numbered in the above Cas9 reference sequence, or a corresponding amino acid residue in another Cas9 polypeptide. The N-terminal Cas9 fragment can comprise a sequence comprising at least: 85%, at least 90%, at least 91%, at least 92%, at least 93%, at least 94%, at least 95%, at least 96%, at least 97%, at least 98%, at least 99%, or at least 99.5% sequence identity to amino acid residues: 1099-1368, 918-1368, 906-1368, 780-1368, 765-1368, 718-1368, 94-1368, or 56-1368 as numbered in the above Cas9 reference sequence, or a corresponding amino acid residue in another Cas9 polypeptide.

[0379] The N-terminal Cas9 fragment and C-terminal Cas9 fragment of a fusion protein taken together may not correspond to a full-length naturally occurring Cas9 polypeptide sequence, for example, as set forth in the above Cas9 reference sequence.

[0380] The fusion protein described herein can effect targeted deamination with reduced deamination at non-target sites (e.g., off-target sites), such as reduced genome wide spurious deamination. The fusion protein described herein can effect targeted deamination with reduced bystander deamination at non-target sites. The undesired deamination or off-target deamination can be reduced by at least 30%, at least 40%, at least 50%, at least 60%, at least 70%, at least 80%, at least 90%, at least 95%, or at least 99% compared with, for example, an end terminus fusion protein comprising the deaminase fused to a N terminus or a C terminus of a Cas9 polypeptide. The undesired deamination or off-target deamination can be reduced by at least one-fold, at least two-fold, at least three-fold, at least four-fold, at least five-fold, at least tenfold, at least fifteen fold, at least twenty fold, at least thirty fold, at least forty fold, at least fifty fold, at least 60 fold, at least 70 fold, at least 80 fold, at least 90 fold, or at least hundred fold, compared with, for example, an end terminus fusion protein comprising the deaminase fused to a N terminus or a C terminus of a Cas9 polypeptide.

[0381] In some embodiments, the deaminase (e.g., adenosine deaminase) of the fusion protein deaminates no more than two nucleobases within the range of an R-loop. In some embodiments, the deaminase of the fusion protein deaminates no more than three nucleobases within the range of the R-loop. In some embodiments, the deaminase of the fusion protein deaminates no more than 2, 3, 4, 5, 6, 7, 8, 9, or 10 nucleobases within the range of the R-loop. An R-loop is a three-stranded nucleic acid structure including a DNA:RNA hybrid, a DNA:DNA or an RNA: RNA complementary structure and the associated with single-stranded DNA. As used herein, an R-loop may be formed when a target polynucleotide is contacted with a CRISPR complex or a base editing complex, wherein a portion of a guide polynucleotide, e.g. a guide RNA, hybridizes with and displaces with a portion of a target polynucleotide, e.g. a target DNA. In some embodiments, an R-loop comprises a hybridized region of a spacer sequence and a target DNA complementary sequence. An R-loop region may be of about 5, 6, 7, 8, 9, 10, 11, 12, 13, 14, 15, 16, 17, 18, 19, 20, 21, 22, 23, 24, 25, 26, 27, 28, 29, 30, 31, 32, 33, 34, 35, 36, 37, 38, 39, 40, 41, 42, 43, 44, 45, 46, 47, 48, 49, or 50 nucleobase pairs in length. In some embodiments, the R-loop region is about 20 nucleobase pairs in length. It should be understood that, as used herein, an R-loop region is not limited to the target DNA strand that hybridizes with the guide polynucleotide. For example, editing of a target nucleobase within an R-loop region may be to a DNA strand that comprises the complementary strand to a guide RNA, or may be to a DNA strand that is the opposing strand of the strand complementary to the guide RNA. In some embodiments, editing in the region of the R-loop comprises editing a nucleobase on non-complementary strand (protospacer strand) to a guide RNA in a target DNA sequence.

[0382] The fusion protein described herein can effect target deamination in an editing window different from canonical base editing. In some embodiments, a target nucleobase is from about 1 to about 20 bases upstream of a PAM sequence in the target polynucleotide sequence. In some embodiments, a target nucleobase is from about 2 to about 12 bases upstream of a PAM sequence in the target polynucleotide sequence. In some embodiments, a target nucleobase is from about 1 to 9 base pairs, about 2 to 10 base pairs, about 3 to 11 base pairs, about 4 to 12 base pairs, about 5 to 13 base pairs, about 6 to 14 base pairs, about 7 to 15 base pairs, about 8 to 16 base pairs, about 9 to 17 base pairs, about 10 to 18 base pairs, about 11 to 19 base pairs, about 12 to 20 base pairs, about 1 to 7 base pairs, about 2 to 8 base pairs, about 3 to 9 base pairs, about 4 to 10 base pairs, about 5 to 11 base pairs, about 6 to 12 base pairs, about 7 to 13 base pairs, about 8 to 14 base pairs, about 9 to 15 base pairs, about 10 to 16 base pairs, about 11 to 17 base pairs, about 12 to 18 base pairs, about 13 to 19 base pairs, about 14 to 20 base pairs, about 1 to 5 base pairs, about 2 to 6 base pairs, about 3 to 7 base pairs, about 4 to 8 base pairs, about 5 to 9 base pairs, about 6 to 10 base pairs, about 7 to 11 base pairs, about 8 to 12 base pairs, about 9 to 13 base pairs, about 10 to 14 base pairs, about 11 to 15 base pairs, about 12 to 16 base pairs, about 13 to 17 base pairs, about 14 to 18 base pairs, about 15 to 19 base pairs, about 16 to 20 base pairs, about 1 to 3 base pairs, about 2 to 4 base pairs, about 3 to 5 base pairs, about 4 to 6 base pairs, about 5 to 7 base pairs, about 6 to 8 base pairs, about 7 to 9 base pairs, about 8 to 10 base pairs, about 9 to 11 base pairs, about 10 to 12 base pairs, about 11 to 13 base pairs, about 12 to 14 base pairs, about 13 to 15 base pairs, about 14 to 16 base pairs, about 15 to 17 base pairs, about 16 to 18 base pairs, about 17 to 19 base pairs, about 18 to 20 base pairs away or upstream of the PAM sequence. In some embodiments, a target nucleobase is about 1, 2, 3, 4, 5, 6, 7, 8, 9, 10, 11, 12, 13, 14, 15, 16, 17, 18, 19, 20, or more base pairs away from or upstream of the PAM sequence. In some embodiments, a target nucleobase is about 1, 2, 3, 4, 5, 6, 7, 8, or 9 base pairs upstream of the PAM sequence. In some embodiments, a target nucleobase is about 2, 3, 4, or 6 base pairs upstream of the PAM sequence.

[0383] The fusion protein can comprise more than one heterologous polypeptide. For example, the fusion protein can additionally comprise one or more UGI domains and/or one or more nuclear localization signals. The two or more heterologous domains can be inserted in tandem. The two or more heterologous domains can be inserted at locations such that they are not in tandem in the NapDNAbp.

[0384] A fusion protein can comprise a linker between the deaminase and the napDNAbp polypeptide. The linker can be a peptide or a non-peptide linker. For example, the linker can be an XTEN, (GGGS)n (SEQ ID NO: 246), (GGGGS)n (SEQ ID NO: 247), (G)n, (EAAAK)n (SEQ ID NO: 248), (GGS)n, SGSETPGTSESATPES (SEQ ID NO: 249).

[0385] In some embodiments, the napDNAbp in the fusion protein is a Cas12 polypeptide, e.g., Cas12b/C2c1, or a fragment thereof. The Cas12 polypeptide can be a variant Cas12 polypeptide. In other embodiments, the N- or C-terminal fragments of the Cas12 polypeptide comprise a nucleic acid programmable DNA binding domain or a RuvC domain. In other embodiments, the fusion protein contains a linker between the Cas12 polypeptide and the catalytic domain. In other embodiments, the amino acid sequence of the linker is GGSGGS (SEQ ID NO: 250) or GSSGSETPGTSESATPESSG (SEQ ID NO: 251). In other embodiments, the linker is a rigid linker. In other embodiments of the above aspects, the linker is encoded by GGAGGCTCTGGAGGAAGC (SEQ ID NO: 252) or GGCTCTTCTGGATCTGAAACACCTGGCACAAGCGAGAGCGCCACCCCTGAGAGCTCTGGC (SEQ ID NO: 253).

[0386] In some embodiments, the fusion protein comprises a linker between the N-terminal Cas9 fragment and the deaminase. In some embodiments, the fusion protein comprises a linker between the C-terminal Cas9 fragment and the deaminase. In some embodiments, the N-terminal and C-terminal fragments of napDNAbp are connected to the deaminase with a linker. In some embodiments, the N-terminal and C-terminal fragments are joined to the deaminase domain without a linker. In some embodiments, the fusion protein comprises a linker between the N-terminal Cas9 fragment and the deaminase, but does not comprise a linker between the C-terminal Cas9 fragment and the deaminase. In some embodiments, the fusion protein comprises a linker between the C-terminal Cas9 fragment and the deaminase, but does not comprise a linker between the N-terminal Cas9 fragment and the deaminase.

[0387] In some embodiments, the base editing system described herein is an ABE with TadA inserted into a Cas9. Sequences of relevant ABEs with TadA inserted into a Cas9 are provided. In some embodiments, adenosine deaminase base editors were generated to insert TadA or variants thereof into the Cas9 polypeptide at the identified positions.

[0388] Fusion proteins comprising a heterologous catalytic domain flanked by N- and C-terminal fragments of a Cas12 polypeptide are also useful for base editing in the methods as described herein. Fusion proteins comprising Cas12 and one or more deaminase domains, e.g., adenosine deaminase, or comprising an adenosine deaminase domain flanked by Cas12 sequences are also useful for highly specific and efficient base editing of target sequences. In an embodiment, a chimeric Cas12 fusion protein contains a heterologous catalytic domain (e.g., adenosine deaminase, cytidine deaminase, or adenosine deaminase and cytidine deaminase) inserted within a Cas12 polypeptide. In some embodiments, the fusion protein comprises an adenosine deaminase domain and a cytidine deaminase domain inserted within a Cas12. In some embodiments, an adenosine deaminase is fused within Cas12 and a cytidine deaminase is fused to the C-terminus. In some embodiments, an adenosine deaminase is fused within Cas12 and a cytidine deaminase fused to the N-terminus. In some embodiments, a cytidine deaminase is fused within Cas12 and an adenosine deaminase is fused to the C-terminus. In some embodiments, a cytidine deaminase is fused within Cas12 and an adenosine deaminase fused to the N-terminus. Exemplary structures of a fusion protein with an adenosine deaminase and a cytidine deaminase and a Cas12 are provided as follows:
[0389] NH2-[Cas12(adenosine deaminase)]-[cytidine deaminase]-COOH;
[0390] NH2-[cytidine deaminase]-[Cas12(adenosine deaminase)]-COOH;
[0391] NH2-[Cas12(cytidine deaminase)]-[adenosine deaminase]-COOH; or
[0392] NH2-[adenosine deaminase]-[Cas12(cytidine deaminase)]-COOH;

[0393] In some embodiments, the “-” used in the general architecture above indicates the presence of an optional linker.

[0394] In various embodiments, the catalytic domain has DNA modifying activity (e.g., deaminase activity), such as adenosine deaminase activity. In some embodiments, the adenosine deaminase is a TadA (e.g., TadA*7.10). In some embodiments, the TadA is a TadA*8. In some embodiments, a TadA*8 is fused within Cas12 and a cytidine deaminase is fused to the C-terminus. In some embodiments, a TadA*8 is fused within Cas12 and a cytidine deaminase fused to the N-terminus. In some embodiments, a cytidine deaminase is fused within Cas12 and a TadA*8 is fused to the C-terminus. In some embodiments, a cytidine deaminase is fused within Cas12 and a TadA*8 fused to the N-terminus. Exemplary structures of a fusion protein with a TadA*8 and a cytidine deaminase and a Cas12 are provided as follows:
[0395] N-[Cas12(TadA*8)]-[cytidine deaminase]-C;
[0396] N-[cytidine deaminase]-[Cas12(TadA*8)]-C;
[0397] N-[Cas12(cytidine deaminase)]-[TadA*8]-C; or
[0398] N-[TadA*8]-[Cas12(cytidine deaminase)]-C.

[0399] In some embodiments, the “-” used in the general architecture above indicates the presence of an optional linker.

[0400] In other embodiments, the fusion protein contains one or more catalytic domains. In other embodiments, at least one of the one or more catalytic domains is inserted within the Cas12 polypeptide or is fused at the Cas12 N-terminus or C-terminus. In other embodiments, at least one of the one or more catalytic domains is inserted within a loop, an alpha helix region, an unstructured portion, or a solvent accessible portion of the Cas12 polypeptide. In other embodiments, the Cas12 polypeptide is Cas12a, Cas12b, Cas12c, Cas12d, Cas12e, Cas12g, Cas12h, Cas12i, or Cas12j/CasΦ. In other embodiments, the Cas12 polypeptide has at least about 85% amino acid sequence identity to Bacillus hisashii Cas12b, Bacillus thermoamylovorans Cas12b, Bacillus sp. V3-13 Cas12b, or Alicyclobacillus acidiphilus Cas12b (SEQ ID NO: 254). In other embodiments, the Cas12 polypeptide has at least about 90% amino acid sequence identity to Bacillus hisashii Cas12b (SEQ ID NO: 255), Bacillus thermoamylovorans Cas12b, Bacillus sp. V3-13 Cas12b, or Alicyclobacillus acidiphilus Cas12b. In other embodiments, the Cas12 polypeptide has at least about 95% amino acid sequence identity to Bacillus hisashii Cas12b, Bacillus thermoamylovorans Cas12b (SEQ ID NO: 256), Bacillus sp. V3-13 Cas12b (SEQ ID NO: 257), or Alicyclobacillus acidiphilus Cas12b. In other embodiments, the Cas12 polypeptide contains or consists essentially of a fragment of Bacillus hisashii Cas12b, Bacillus thermoamylovorans Cas12b, Bacillus sp. V3-13 Cas12b, or Alicyclobacillus acidiphilus Cas12b. In embodiments, the Cas12 polypeptide contains BvCas12b (V4), which in some embodiments is expressed as 5′ mRNA Cap-5′ UTR-bhCas12b-STOP sequence-3′ UTR-120polyA tail (SEQ ID NOs: 258-260).

[0401] In other embodiments, the catalytic domain is inserted between amino acid positions 153-154, 255-256, 306-307, 980-981, 1019-1020, 534-535, 604-605, or 344-345 of BhCas12b or a corresponding amino acid residue of Cas12a, Cas12c, Cas12d, Cas12e, Cas12g, Cas12h, Cas12i, or Cas12j/CasΦ. In other embodiments, the catalytic domain is inserted between amino acids P153 and S154 of BhCas12b. In other embodiments, the catalytic domain is inserted between amino acids K255 and E256 of BhCas12b. In other embodiments, the catalytic domain is inserted between amino acids D980 and G981 of BhCas12b. In other embodiments, the catalytic domain is inserted between amino acids K1019 and L1020 of BhCas12b. In other embodiments, the catalytic domain is inserted between amino acids F534 and P535 of BhCas12b. In other embodiments, the catalytic domain is inserted between amino acids K604 and G605 of BhCas12b. In other embodiments, the catalytic domain is inserted between amino acids H344 and F345 of BhCas12b. In other embodiments, catalytic domain is inserted between amino acid positions 147 and 148, 248 and 249, 299 and 300, 991 and 992, or 1031 and 1032 of BvCas12b or a corresponding amino acid residue of Cas12a, Cas12c, Cas12d, Cas12e, Cas12g, Cas12h, Cas12i, or Cas12j/CasΦ. In other embodiments, the catalytic domain is inserted between amino acids P147 and D148 of BvCas12b. In other embodiments, the catalytic domain is inserted between amino acids G248 and G249 of BvCas12b. In other embodiments, the catalytic domain is inserted between amino acids P299 and E300 of BvCas12b. In other embodiments, the catalytic domain is inserted between amino acids G991 and E992 of BvCas12b. In other embodiments, the catalytic domain is inserted between amino acids K1031 and M1032 of BvCas12b. In other embodiments, the catalytic domain is inserted between amino acid positions 157 and 158, 258 and 259, 310 and 311, 1008 and 1009, or 1044 and 1045 of AaCas12b or a corresponding amino acid residue of Cas12a, Cas12c, Cas12d, Cas12e, Cas12g, Cas12h, Cas12i, or Cas12j/CasΦ. In other embodiments, the catalytic domain is inserted between amino acids P157 and G158 of AaCas12b. In other embodiments, the catalytic domain is inserted between amino acids V258 and G259 of AaCas12b. In other embodiments, the catalytic domain is inserted between amino acids D310 and P311 of AaCas12b. In other embodiments, the catalytic domain is inserted between amino acids G1008 and E1009 of AaCas12b. In other embodiments, the catalytic domain is inserted between amino acids G1044 and K1045 at of AaCas12b.

[0402] In other embodiments, the fusion protein contains a nuclear localization signal (e.g., a bipartite nuclear localization signal). In other embodiments, the amino acid sequence of the nuclear localization signal is MAPKKKRKVGIHGVPAA (SEQ ID NO: 261). In other embodiments of the above aspects, the nuclear localization signal is encoded by the following sequence:

[0403] ATGGCCCCAAAGAAGAAGCGGAAGGTCGGTATCCACGGAGTCCCAGCAGCC (SEQ ID NO: 262). In other embodiments, the Cas12b polypeptide contains a mutation that silences the catalytic activity of a RuvC domain. In other embodiments, the Cas12b polypeptide contains D574A, D829A and/or D952A mutations. In other embodiments, the fusion protein further contains a tag (e.g., an influenza hemagglutinin tag).

[0404] In some embodiments, the fusion protein comprises a napDNAbp domain (e.g., Cas12-derived domain) with an internally fused nucleobase editing domain (e.g., all or a portion of a deaminase domain, e.g., an adenosine deaminase domain). In some embodiments, the napDNAbp is a Cas12b. In some embodiments, the base editor comprises a BhCas12b domain with an internally fused TadA*8 domain inserted at the loci provided in Table 7 below.

TABLE 7
Insertion loci in Cas 12b proteins

| | Insertion site | Inserted between aa |
|---|---|---|
| BhCas12b | | |
| position 1 | 153 | PS |
| position 2 | 255 | KE |
| position 3 | 306 | DE |
| position 4 | 980 | DG |
| position 5 | 1019 | KL |
| position 6 | 534 | FP |
| position 7 | 604 | KG |
| position 8 | 344 | HF |
| BvCas12b | | |
| position 1 | 147 | PD |
| position 2 | 248 | GG |
| position 3 | 299 | PE |
| position 4 | 991 | GE |
| position 5 | 1031 | KM |
| AaCas12b | | |
| position 1 | 157 | PG |
| position 2 | 258 | VG |
| position 3 | 310 | DP |
| position 4 | 1008 | GE |
| position 5 | 1044 | GK |

[0405] By way of nonlimiting example, an adenosine deaminase (e.g., TadA*8.13) may be inserted into a BhCas12b to produce a fusion protein (e.g., TadA*8.13-BhCas12b) that effectively edits a nucleic acid sequence.

[0406] Exemplary, yet nonlimiting, fusion proteins are described in International PCT Application Nos. PCT/US2020/016285, PCT/US2020/018073, PCT/US2020/018107, PCT/US2020/018124, PCT/US2020/018132, PCT/US2020/018169, PCT/US2020/018178, PCT/US2020/018192, PCT/US2020/018193, and PCT/US2020/018195, the contents of which are incorporated by reference herein in their entireties.

### A to G Editing

[0407] In some embodiments, a base editor described herein comprises an adenosine deaminase domain. Such an adenosine deaminase domain of a base editor can facilitate the editing of an adenine (A) nucleobase to a guanine (G) nucleobase by deaminating the A to form inosine (I), which exhibits base pairing properties of G. Adenosine deaminase is capable of deaminating (i.e., removing an amine group) adenine of a deoxyadenosine residue in deoxyribonucleic acid (DNA). In some embodiments, an A-to-G base editor further comprises an inhibitor of inosine base excision repair, for example, a uracil glycosylase inhibitor (UGI) domain or a catalytically inactive inosine specific nuclease. Without wishing to be bound by any particular theory, the UGI domain or catalytically inactive inosine specific nuclease can inhibit or prevent base excision repair of a deaminated adenosine residue (e.g., inosine), which can improve the activity or efficiency of the base editor.

[0408] A base editor comprising an adenosine deaminase can act on any polynucleotide, including DNA, RNA and DNA-RNA hybrids. In certain embodiments, a base editor comprising an adenosine deaminase can deaminate a target A of a polynucleotide comprising RNA. For example, the base editor can comprise an adenosine deaminase domain capable of deaminating a target A of an RNA polynucleotide and/or a DNA-RNA hybrid polynucleotide. In an embodiment, an adenosine deaminase incorporated into a base editor comprises all or a portion of adenosine deaminase acting on RNA (ADAR, e.g., ADAR1 or ADAR2) or tRNA (ADAT). A base editor comprising an adenosine deaminase domain can also be capable of deaminating an A nucleobase of a DNA polynucleotide. In an embodiment an adenosine deaminase domain of a base editor comprises all or a portion of an ADAT comprising one or more mutations which permit the ADAT to deaminate a target A in DNA. For example, the base editor can comprise all or a portion of an ADAT from Escherichia coli (EcTadA) comprising one or more of the following mutations: D108N, A106V, D147Y, E155V, L84F, H123Y, I156F, or a corresponding mutation in another adenosine deaminase. Exemplary ADAT homolog polypeptide sequences are provided in the Sequence Listing as SEQ ID NOs: 1 and 309-315.

[0409] In some embodiments, a base editor described herein comprises a fusion protein comprising an adenosine deaminase domain (e.g., adenosine deaminase variant domain). In some embodiments, an adenosine deaminase variant domain contains a combination of alterations in a TadA*7.10 amino acid sequence, where the combinations are V82G, Y147T/D, Q154S, and one or more of L36H, I76Y, F149Y, N157K, and D167N. In some embodiments, the combinations of alterations in a TadA*7.10 amino acid sequence are V82G+Y147T+Q154S; I76Y+V82G+Y147T+Q154S; L36H+V82G+Y147T+Q154S+N157K; V82G+Y147D+F149Y+Q154S+D167N; L36H+V82G+Y147D+F149Y+Q154S+N157K+D167N; L36H+I76Y+V82G+Y147T+Q154S+N157K; I76Y+V82G+Y147D+F149Y+Q154S+D167N; or L36H+I76Y+V82G+Y147D+F149Y+Q154S+N157K+D167N or a corresponding alteration in another adenosine deaminase. Such an adenosine deaminase domain of a base editor can facilitate the editing of an adenine (A) nucleobase to a guanine (G) nucleobase by deaminating the A to form inosine (I), which exhibits base pairing properties of G. Adenosine deaminase is capable of deaminating (i.e., removing an amine group) adenine of a deoxyadenosine residue in deoxyribonucleic acid (DNA).

[0410] In some embodiments, the nucleobase editors provided herein can be made by fusing together one or more protein domains, thereby generating a fusion protein. In certain embodiments, the fusion proteins provided herein comprise one or more features that improve the base editing activity (e.g., efficiency, selectivity, and specificity) of the fusion proteins. For example, the fusion proteins provided herein can comprise a Cas9 domain that has reduced nuclease activity. In some embodiments, the fusion proteins provided herein can have a Cas9 domain that does not have nuclease activity (dCas9), or a Cas9 domain that cuts one strand of a duplexed DNA molecule, referred to as a Cas9 nickase (nCas9). Without wishing to be bound by any particular theory, the presence of the catalytic residue (e.g., H840) maintains the activity of the Cas9 to cleave the non-edited (e.g., non-deaminated) strand containing a T opposite the targeted A. Mutation of the catalytic residue (e.g., D10 to A10) of Cas9 prevents cleavage of the edited strand containing the targeted A residue. Such Cas9 variants are able to generate a single-strand DNA break (nick) at a specific location based on the gRNA-defined target sequence, leading to repair of the non-edited strand, ultimately resulting in a T to C change on the non-edited strand. In some embodiments, an A-to-G base editor further comprises an inhibitor of inosine base excision repair, for example, a uracil glycosylase inhibitor (UGI) domain or a catalytically inactive inosine specific nuclease. Without wishing to be bound by any particular theory, the UGI domain or catalytically inactive inosine specific nuclease can inhibit or prevent base excision repair of a deaminated adenosine residue (e.g., inosine), which can improve the activity or efficiency of the base editor.

[0411] A base editor comprising an adenosine deaminase can act on any polynucleotide, including DNA, RNA and DNA-RNA hybrids. In certain embodiments, a base editor comprising an adenosine deaminase can deaminate a target A of a polynucleotide comprising RNA. For example, the base editor can comprise an adenosine deaminase domain capable of deaminating a target A of an RNA polynucleotide and/or a DNA-RNA hybrid polynucleotide. In an embodiment, an adenosine deaminase incorporated into a base editor comprises all or a portion of adenosine deaminase acting on RNA (ADAR, e.g., ADAR1 or ADAR2). In another embodiment, an adenosine deaminase incorporated into a base editor comprises all or a portion of adenosine deaminase acting on tRNA (ADAT). A base editor comprising an adenosine deaminase domain can also be capable of deaminating an A nucleobase of a DNA polynucleotide. In an embodiment an adenosine deaminase domain of a base editor comprises all or a portion of an ADAT comprising one or more mutations which permit the ADAT to deaminate a target A in DNA. For example, the base editor can comprise all or a portion of an ADAT from Escherichia coli (EcTadA) comprising one or more of the following mutations: D108N, A106V, D147Y, E155V, L84F, H123Y, I156F, or a corresponding mutation in another adenosine deaminase.

[0412] The adenosine deaminase can be derived from any suitable organism (e.g., E. coli). In some embodiments, the adenosine deaminase is from a prokaryote. In some embodiments, the adenosine deaminase is from a bacterium. In some embodiments, the adenosine deaminase is from Escherichia coli, Staphylococcus aureus, Salmonella typhi, Shewanella putrefaciens, Haemophilus influenzae, Caulobacter crescentus, or Bacillus subtilis. In some embodiments, the adenosine deaminase is from E. coli. In some embodiments, the adenine deaminase is a naturally-occurring adenosine deaminase that includes one or more mutations corresponding to any of the mutations provided herein (e.g., mutations in ecTadA). The corresponding residue in any homologous protein can be identified by e.g., sequence alignment and determination of homologous residues. The mutations in any naturally-occurring adenosine deaminase (e.g., having homology to ecTadA) that correspond to any of the mutations described herein (e.g., any of the mutations identified in ecTadA) can be generated accordingly.

### Adenosine Deaminases

[0413] In some embodiments, the fusion proteins as described herein comprise one or more adenosine deaminase domains. In some embodiments, the adenosine deaminases provided herein are capable of deaminating adenine. In some embodiments, the adenosine deaminases provided herein are capable of deaminating adenine in a deoxyadenosine residue of DNA. The adenosine deaminase may be derived from any suitable organism (e.g., E. coli). In some embodiments, the adenine deaminase is a naturally-occurring adenosine deaminase that includes one or more mutations corresponding to any of the mutations provided herein (e.g., mutations in ecTadA). One of skill in the art will be able to identify the corresponding residue in any homologous protein, e.g., by sequence alignment and determination of homologous residues. Accordingly, one of skill in the art would be able to generate mutations in any naturally-occurring adenosine deaminase (e.g., having homology to ecTadA) that corresponds to any of the mutations described herein, e.g., any of the mutations identified in ecTadA. In some embodiments, the adenosine deaminase is from a prokaryote. In some embodiments, the adenosine deaminase is from a bacterium. In some embodiments, the adenosine deaminase is from Escherichia coli, Staphylococcus aureus, Salmonella typhi, Shewanella putrefaciens, Haemophilus influenzae, Caulobacter crescentus, or Bacillus subtilis. In some embodiments, the adenosine deaminase is from E. coli.

[0414] Provided and described herein are adenosine deaminase variants that have increased efficiency (>50-60%) and specificity. In particular, the adenosine deaminase variants described herein are more likely to edit a desired base within a polynucleotide, and are less likely to edit bases that are not intended to be altered (i.e., “bystanders”).

[0415] In some embodiments, the adenosine deaminase is a TadA deaminase. In particular embodiments, the TadA is any one of the TadA described in PCT/US2017/045381 (WO 2018/027078), which is incorporated herein by reference in its entirety.

[0416] A wild type TadA(wt) adenosine deaminase has the following sequence (also termed TadA reference sequence):

(SEQ ID NO: 391)
MSEVEFSHEYWMRHALTLAKRAWDEREVPVGAVLVHNNRVIGEGWNRPIG
RHDPTAHAEIMALRQGGLVMQNYRLIDATLYVTLEPCVMCAGAMIHSRIG
RVVFGARDAKTGAAGSLMDVLHHPGMNHRVEITEGILADECAALLSDFFR
MRRQEIKAQKKAQSSTD

[0417] In some embodiments the adenosine deaminase is a full-length E. coli TadA deaminase. For example, in certain embodiments, the adenosine deaminase comprises the amino acid sequence:

(SEQ ID NO: 392)
MRRAFITGVFFLSEVEFSHEYWMRHALTLAKRAWDEREVPVGAVLVHNNR
VIGEGWNRPIGRHDPTAHAEIMALRQGGLVMQNYRLIDATLYVTLEPCVM
CAGAMIHSRIGRVVFGARDAKTGAAGSLMDVLHHPGMNHRVEITEGILAD
ECAALLSDFFRMRRQEIKAQKKAQSSTD.

[0418] In some embodiments, the adenosine deaminase is from a prokaryote. In some embodiments, the adenosine deaminase is from a bacterium. In some embodiments, the adenosine deaminase is from Escherichia coli (E. coli), Staphylococcus aureus (S. aureus), Salmonella typhimurium (S. typhimurium), Shewanella putrefaciens (S. putrefaciens), Haemophilus influenzae (H. influenzae), Caulobacter crescentus (C. crescentus), Geobacter sulfurreducens (G. sulfurreducens), or Bacillus subtilis. In some embodiments, the adenosine deaminase is from E. coli.

[0419] It should be appreciated, however, that additional adenosine deaminases useful in the present application would be apparent to the skilled artisan and are within the scope of this disclosure. For example, the adenosine deaminase may be a homolog of adenosine deaminase acting on tRNA (ADAT). Without limitation, the amino acid sequences of exemplary AD AT homologs include the following:

Staphylococcus aureus (S. aureus) TadA:
(SEQ ID NO: 309)
MGSHMTNDIYFMTLAIEEAKKAAQLGEVPIGAIITKDDEVIARAHNLRET
LQQPTAHAEHIAIERAAKVLGSWRLEGCTLYVTLEPCVMCAGTIVMSRIP
RVVYGADDPKGGCSGSLMNLLQQSNFNHRAIVDKGVLKEACSTLLTTFFK
NLRANKKSTN
Bacillus subtilis (B. subtilis) TadA:
(SEQ ID NO: 310)
MTQDELYMKEAIKEAKKAEEKGEVPIGAVLVINGEIIARAHNLRETEQRS
IAHAEMLVIDEACKALGTWRLEGATLYVTLEPCPMCAGAVVLSRVEKVVF
GAFDPKGGCSGTLMNLLQEERFNHQAEVVSGVLEEECGGMLSAFFRELRK
KKKAARKNLSE
Salmonella typhimurium (S. typhimurium) TadA:
(SEQ ID NO: 311)
MPPAFITGVTSLSDVELDHEYWMRHALTLAKRAWDEREVPVGAVLVHNHR
VIGEGWNRPIGRHDPTAHAEIMALRQGGLVLQNYRLLDTTLYVTLEPCVM
CAGAMVHSRIGRVVFGARDAKTGAAGSLIDVLHHPGMNHRVEIIEGVLRD
ECATLLSDFFRMRRQEIKALKKADRAEGAGPAV
Shewanella putrefaciens (S. putrefaciens) TadA:
(SEQ ID NO: 312)
MDEYWMQVAMQMAEKAEAAGEVPVGAVLVKDGQQIATGYNLSISQHDPTA
HAEILCLRSAGKKLENYRLLDATLYITLEPCAMCAGAMVHSRIARVVYGA
RDEKTGAAGTVVNLLQHPAFNHQVEVTSGVLAEACSAQLSRFFKRRRDEK
KALKLAQRAQQGIE
Haemophilus influenzae F3031 (H. influenzae) TadA:
(SEQ ID NO: 313)
MDAAKVRSEFDEKMMRYALELADKAEALGEIPVGAVLVDDARNIIGEGWN
LSIVQSDPTAHAEIIALRNGAKNIQNYRLLNSTLYVTLEPCTMCAGAILH
SRIKRLVFGASDYKTGAIGSRFHFFDDYKMNHTLEITSGVLAEECSQKLS
TFFQKRREEKKIEKALLKSLSDK
Caulobacter crescentus (C. crescentus) TadA:
(SEQ ID NO: 314)
MRTDESEDQDHRMMRLALDAARAAAEAGETPVGAVILDPSTGEVIATAGN
GPIAAHDPTAHAEIAAMRAAAAKLGNYRLTDLTLVVTLEPCAMCAGAISH
ARIGRVVFGADDPKGGAVVHGPKFFAQPTCHWRPEVTGGVLADESADLLR
GFFRARRKAKI
Geobacter sulfurreducens (G. sulfurreducens) TadA:
(SEQ ID NO: 315)
MSSLKKTPIRDDAYWMGKAIREAAKAAARDEVPIGAVIVRDGAVIGRGHN
LREGSNDPSAHAEMIAIRQAARRSANWRLTGATLYVTLEPCLMCMGAIIL
ARLERVVFGCYDPKGGAAGSLYDLSADPRLNHQVRLSPGVCQEECGTMLS
DFFRDLRRRKKAKATPALFIDERKVPPEP
An embodiment of E. Coli TadA (ecTadA) includes
the following:
(SEQ ID NO: 1)
MSEVEFSHEYWMRHALTLAKRARDEREVPVGAVLVLNNRVIGEGWNRAIG
LHDPTAHAEIMALRQGGLVMQNYRLIDATLYVTFEPCVMCAGAMIHSRIG
RVVFGVRNAKTGAAGSLMDVLHYPGMNHRVEITEGILADECAALLCYFFR
MPRQVFNAQKKAQSSTD

[0420] In some embodiments, the adenosine deaminase comprises an amino acid sequence that is at least 60%, at least 65%, at least 70%, at least 75%, at least 80%, at least 85%, at least 90%, at least 95%, at least 96%, at least 97%, at least 98%, at least 99%, or at least 99.5% identical to any one of the amino acid sequences set forth in any of the adenosine deaminases provided herein. It should be appreciated that adenosine deaminases provided herein may include one or more mutations (e.g., any of the mutations provided herein). The disclosure provides any deaminase domains with a certain percent identity plus any of the mutations or combinations thereof described herein. In some embodiments, the adenosine deaminase comprises an amino acid sequence that has 1, 2, 3, 4, 5, 6, 7, 8, 9, 10, 11, 12, 13, 14, 15, 16, 17, 18, 19, 20, 21, 22, 21, 24, 25, 26, 27, 28, 29, 30, 31, 32, 33, 34, 35, 36, 37, 38, 39, 40, 41, 42, 43, 44, 45, 46, 47, 48, 49, 50, or more mutations compared to a reference sequence, or any of the adenosine deaminases provided herein. In some embodiments, the adenosine deaminase comprises an amino acid sequence that has at least 5, at least 10, at least 15, at least 20, at least 25, at least 30, at least 35, at least 40, at least 45, at least 50, at least 60, at least 70, at least 80, at least 90, at least 100, at least 110, at least 120, at least 130, at least 140, at least 150, at least 160, or at least 170 identical contiguous amino acid residues as compared to any one of the amino acid sequences known in the art or described herein.

[0421] It should be appreciated that any of the mutations provided herein (e.g., based on the TadA reference sequence) can be introduced into other adenosine deaminases, such as E. coli TadA (ecTadA), S. aureus TadA (saTadA), or other adenosine deaminases (e.g., bacterial adenosine deaminases). It would be apparent to the skilled artisan that additional deaminases may similarly be aligned to identify homologous amino acid residues that can be mutated as provided herein. Thus, any of the mutations identified in the TadA reference sequence can be made in other adenosine deaminases (e.g., ecTada) that have homologous amino acid residues. It should also be appreciated that any of the mutations provided herein can be made individually or in any combination in the TadA reference sequence or another adenosine deaminase.

[0422] In some embodiments, the adenosine deaminase comprises a D108X mutation in the TadA reference sequence, or a corresponding mutation in another adenosine deaminase, where X indicates any amino acid other than the corresponding amino acid in the wild-type adenosine deaminase. In some embodiments, the adenosine deaminase comprises a D108G, D108N, D108V, D108A, or D108Y mutation in TadA reference sequence, or a corresponding mutation in another adenosine deaminase. It should be appreciated, however, that additional deaminases may similarly be aligned to identify homologous amino acid residues that can be mutated as provided herein.

[0423] In some embodiments, the adenosine deaminase comprises an A106X mutation in TadA reference sequence, or a corresponding mutation in another adenosine deaminase, where X indicates any amino acid other than the corresponding amino acid in the wild-type adenosine deaminase. In some embodiments, the adenosine deaminase comprises an A106V mutation in TadA reference sequence, or a corresponding mutation in another adenosine deaminase (e.g., ecTadA).

[0424] In some embodiments, the adenosine deaminase comprises a E155X mutation in TadA reference sequence, or a corresponding mutation in another adenosine deaminase, where the presence of X indicates any amino acid other than the corresponding amino acid in the wild-type adenosine deaminase. In some embodiments, the adenosine deaminase comprises a E155D, E155G, or E155V mutation in TadA reference sequence, or a corresponding mutation in another adenosine deaminase (e.g., ecTadA).

[0425] In some embodiments, the adenosine deaminase comprises a D147X mutation in TadA reference sequence, or a corresponding mutation in another adenosine deaminase, where the presence of X indicates any amino acid other than the corresponding amino acid in the wild-type adenosine deaminase. In some embodiments, the adenosine deaminase comprises a D147Y, mutation in TadA reference sequence, or a corresponding mutation in another adenosine deaminase (e.g., ecTadA).

[0426] In some embodiments, the adenosine deaminase comprises an A106X, E155X, or D147X, mutation in the TadA reference sequence, or a corresponding mutation in another adenosine deaminase (e.g., ecTadA), where X indicates any amino acid other than the corresponding amino acid in the wild-type adenosine deaminase. In some embodiments, the adenosine deaminase comprises an E155D, E155G, or E155V mutation. In some embodiments, the adenosine deaminase comprises a D147Y.

[0427] It should be appreciated that any of the mutations provided herein (e.g., based on the ecTadA amino acid sequence of TadA reference sequence) may be introduced into other adenosine deaminases, such as S. aureus TadA (saTadA), or other adenosine deaminases (e.g., bacterial adenosine deaminases). It would be apparent to the skilled artisan how to are homologous to the mutated residues in ecTadA. Thus, any of the mutations identified in ecTadA may be made in other adenosine deaminases that have homologous amino acid residues. It should also be appreciated that any of the mutations provided herein may be made individually or in any combination in ecTadA or another adenosine deaminase.

[0428] For example, an adenosine deaminase contains a combination of mutations (e.g., V82G+Y147T+Q154S; I76Y+V82G+Y147T+Q154S; L36H+V82G+Y147T+Q154S+N157K; V82G+Y147D+F149Y+Q154S+D167N; L36H+V82G+Y147D+F149Y+Q154S+N157K+D167N; L36H+I76Y+V82G+Y147T+Q154S+N157K; I76Y+V82G+Y147D+F149Y+Q154S+D167N; or L36H+I76Y+V82G+Y147D+F149Y+Q154S+N157K+D167N), and may contain one or more additional mutations. Additional mutations include, for example, a D108N, a A106V, a E155V, and/or a D147Y mutation in TadA reference sequence, or a corresponding mutation in another adenosine deaminase (e.g., ecTadA). In some embodiments, an adenosine deaminase comprises the following group of mutations (groups of mutations are separated by a “;”) in TadA reference sequence, or corresponding mutations in another adenosine deaminase: D108N and A106V; D108N and E155V; D108N and D147Y; A106V and E155V; A106V and D147Y; E155V and D147Y; D108N, A106V, and E155V; D108N, A106V, and D147Y; D108N, E155V, and D147Y; A106V, E155V, and D147Y; and D108N, A106V, E155V, and D147Y. It should be appreciated, however, that any combination of corresponding mutations provided herein may be made in an adenosine deaminase (e.g., ecTadA).

[0429] In some embodiments, the adenosine deaminase comprises one or more of a H8X, T17X, L18X, W23X, L34X, W45X, R51X, A56X, E59X, E85X, M94X, I95X, V102X, F104X, A106X, R107X, D108X, K110X, M118X, N127X, A138X, F149X, M151X, R153X, Q154X, I156X, and/or K157X mutation in TadA reference sequence, or one or more corresponding mutations in another adenosine deaminase, where the presence of X indicates any amino acid other than the corresponding amino acid in the wild-type adenosine deaminase. In some embodiments, the adenosine deaminase comprises one or more of H8Y, T17S, L18E, W23L, L34S, W45L, R51H, A56E, or A56S, E59G, E85K, or E85G, M94L, I95L, V102A, F104L, A106V, R107C, or R107H, or R107P, D108G, or D108N, or D108V, or D108A, or D108Y, K110I, M118K, N127S, A138V, F149Y, M151V, R153C, Q154L, I156D, and/or K157R mutation in TadA reference sequence, or one or more corresponding mutations in another adenosine deaminase.

[0430] In some embodiments, the adenosine deaminase comprises one or more of a H8X, D108X, and/or N127X mutation in TadA reference sequence, or one or more corresponding mutations in another adenosine deaminase, where X indicates the presence of any amino acid. In some embodiments, the adenosine deaminase comprises one or more of a H8Y, D108N, and/or N127S mutation in TadA reference sequence, or one or more corresponding mutations in another adenosine deaminase.

[0431] In some embodiments, the adenosine deaminase comprises one or more of H8X, R26X, M61X, L68X, M70X, A106X, D108X, A109X, N127X, D147X, R152X, Q154X, E155X, K161X, Q163X, and/or T166X mutation in TadA reference sequence, or one or more corresponding mutations in another adenosine deaminase, where X indicates the presence of any amino acid other than the corresponding amino acid in the wild-type adenosine deaminase. In some embodiments, the adenosine deaminase comprises one or more of H8Y, R26W, M61I, L68Q, M70V, A106T, D108N, A109T, N127S, D147Y, R152C, Q154H or Q154R, E155G or E155V or E155D, K161Q, Q163H, and/or T166P mutation in TadA reference sequence, or one or more corresponding mutations in another adenosine deaminase.

[0432] In some embodiments, the adenosine deaminase comprises one, two, three, four, five, or six mutations selected from the group consisting of H8X, D108X, N127X, D147X, R152X, and Q154X in TadA reference sequence, or a corresponding mutation or mutations in another adenosine deaminase (e.g., ecTadA), where X indicates the presence of any amino acid other than the corresponding amino acid in the wild-type adenosine deaminase. In some embodiments, the adenosine deaminase comprises one, two, three, four, five, six, seven, or eight mutations selected from the group consisting of H8X, M61X, M70X, D108X, N127X, Q154X, E155X, and Q163X in TadA reference sequence, or a corresponding mutation or mutations in another adenosine deaminase (e.g., ecTadA), where X indicates the presence of any amino acid other than the corresponding amino acid in the wild-type adenosine deaminase. In some embodiments, the adenosine deaminase comprises one, two, three, four, or five, mutations selected from the group consisting of H8X, D108X, N127X, E155X, and T166X in TadA reference sequence, or a corresponding mutation or mutations in another adenosine deaminase (e.g., ecTadA), where X indicates the presence of any amino acid other than the corresponding amino acid in the wild-type adenosine deaminase. In some embodiments, the adenosine deaminase comprises one, two, three, four, five, or six mutations selected from the group consisting of H8X, A106X, and D108X, or a corresponding mutation or mutations in another adenosine deaminase, where X indicates the presence of any amino acid other than the corresponding amino acid in the wild-type adenosine deaminase. In some embodiments, the adenosine deaminase comprises one, two, three, four, five, six, seven, or eight mutations selected from the group consisting of H8X, R26X, L68X, D108X, N127X, D147X, and E155X, or a corresponding mutation or mutations in another adenosine deaminase, where X indicates the presence of any amino acid other than the corresponding amino acid in the wild-type adenosine deaminase.

[0433] In some embodiments, the adenosine deaminase comprises one, two, three, four, five, six, or seven mutations selected from the group consisting of H8X, R126X, L68X, D108X, N127X, D147X, and E155X in TadA reference sequence, or a corresponding mutation or mutations in another adenosine deaminase, where X indicates the presence of any amino acid other than the corresponding amino acid in the wild-type adenosine deaminase. In some embodiments, the adenosine deaminase comprises one, two, three, four, or five mutations selected from the group consisting of H8X, D108X, A109X, N127X, and E155X in TadA reference sequence, or a corresponding mutation or mutations in another adenosine deaminase, where X indicates the presence of any amino acid other than the corresponding amino acid in the wild-type adenosine deaminase.

[0434] In some embodiments, the adenosine deaminase comprises one, two, three, four, five, or six mutations selected from the group consisting of H8Y, D108N, N127S, D147Y, R152C, and Q154H in TadA reference sequence, or a corresponding mutation or mutations in another adenosine deaminase (e.g., ecTadA). In some embodiments, the adenosine deaminase comprises one, two, three, four, five, six, seven, or eight mutations selected from the group consisting of H8Y, M61I, M70V, D108N, N127S, Q154R, E155G and Q163H in TadA reference sequence, or a corresponding mutation or mutations in another adenosine deaminase (e.g., ecTadA). In some embodiments, the adenosine deaminase comprises one, two, three, four, or five, mutations selected from the group consisting of H8Y, D108N, N127S, E155V, and T166P in TadA reference sequence, or a corresponding mutation or mutations in another adenosine deaminase (e.g., ecTadA). In some embodiments, the adenosine deaminase comprises one, two, three, four, five, or six mutations selected from the group consisting of H8Y, A106T, D108N, N127S, E155D, and K161Q in TadA reference sequence, or a corresponding mutation or mutations in another adenosine deaminase (e.g., ecTadA). In some embodiments, the adenosine deaminase comprises one, two, three, four, five, six, seven, or eight mutations selected from the group consisting of H8Y, R26W, L68Q, D108N, N127S, D147Y, and E155V in TadA reference sequence, or a corresponding mutation or mutations in another adenosine deaminase (e.g., ecTadA). In some embodiments, the adenosine deaminase comprises one, two, three, four, or five, mutations selected from the group consisting of H8Y, D108N, A109T, N127S, and E155G in TadA reference sequence, or a corresponding mutation or mutations in another adenosine deaminase (e.g., ecTadA).

[0435] In some embodiments, the adenosine deaminase comprises one or more of the or one or more corresponding mutations in another adenosine deaminase. In some embodiments, the adenosine deaminase comprises a D108N, D108G, or D108V mutation in TadA reference sequence, or corresponding mutations in another adenosine deaminase. In some embodiments, the adenosine deaminase comprises a A106V and D108N mutation in TadA reference sequence, or corresponding mutations in another adenosine deaminase. In some embodiments, the adenosine deaminase comprises R107C and D108N mutations in TadA reference sequence, or corresponding mutations in another adenosine deaminase. In some embodiments, the adenosine deaminase comprises a H8Y, D108N, N127S, D147Y, and Q154H mutation in TadA reference sequence, or corresponding mutations in another adenosine deaminase. In some embodiments, the adenosine deaminase comprises a H8Y, D108N, N127S, D147Y, and E155V mutation in TadA reference sequence, or corresponding mutations in another adenosine deaminase. In some embodiments, the adenosine deaminase comprises a D108N, D147Y, and E155V mutation in TadA reference sequence, or corresponding mutations in another adenosine deaminase. In some embodiments, the adenosine deaminase comprises a H8Y, D108N, and N127S mutation in TadA reference sequence, or corresponding mutations in another adenosine deaminase. In some embodiments, the adenosine deaminase comprises a A106V, D108N, D147Y, and E155V mutation in TadA reference sequence, or corresponding mutations in another adenosine deaminase (e.g., ecTadA).

[0436] In some embodiments, the adenosine deaminase comprises one or more of S2X, H8X, I49X, L84X, H123X, N127X, I156X, and/or K160X mutation in TadA reference sequence, or one or more corresponding mutations in another adenosine deaminase, where the presence of X indicates any amino acid other than the corresponding amino acid in the wild-type adenosine deaminase. In some embodiments, the adenosine deaminase comprises one or more of S2A, H8Y, I49F, L84F, H123Y, N127S, I156F, and/or K160S mutation in TadA reference sequence, or one or more corresponding mutations in another adenosine deaminase (e.g., ecTadA).

[0437] In some embodiments, the adenosine deaminase comprises an L84X mutation adenosine deaminase, where X indicates any amino acid other than the corresponding amino acid in the wild-type adenosine deaminase. In some embodiments, the adenosine deaminase comprises an L84F mutation in TadA reference sequence, or a corresponding mutation in another adenosine deaminase (e.g., ecTadA).

[0438] In some embodiments, the adenosine deaminase comprises an H123X mutation in TadA reference sequence, or a corresponding mutation in another adenosine deaminase, where X indicates any amino acid other than the corresponding amino acid in the wild-type adenosine deaminase. In some embodiments, the adenosine deaminase comprises an H123Y mutation in TadA reference sequence, or a corresponding mutation in another adenosine deaminase.

[0439] In some embodiments, the adenosine deaminase comprises an I156X mutation in TadA reference sequence, or a corresponding mutation in another adenosine deaminase, where X indicates any amino acid other than the corresponding amino acid in the wild-type adenosine deaminase. In some embodiments, the adenosine deaminase comprises an I156F mutation in TadA reference sequence, or a corresponding mutation in another adenosine deaminase.

[0440] In some embodiments, the adenosine deaminase comprises one, two, three, four, five, six, or seven mutations selected from the group consisting of L84X, A106X, D108X, H123X, D147X, E155X, and I156X in TadA reference sequence, or a corresponding mutation or mutations in another adenosine deaminase, where X indicates the presence of any amino acid other than the corresponding amino acid in the wild-type adenosine deaminase. In some embodiments, the adenosine deaminase comprises one, two, three, four, five, or six mutations selected from the group consisting of S2X, I49X, A106X, D108X, D147X, and E155X in TadA reference sequence, or a corresponding mutation or mutations in another adenosine deaminase, where X indicates the presence of any amino acid other than the corresponding amino acid in the wild-type adenosine deaminase. In some embodiments, the adenosine deaminase comprises one, two, three, four, or five mutations selected from the group consisting of H8X, A106X, D108X, N127X, and K160X in TadA reference sequence, or a corresponding mutation or mutations in another adenosine deaminase, where X indicates the presence of any amino acid other than the corresponding amino acid in the wild-type adenosine deaminase.

[0441] In some embodiments, the adenosine deaminase comprises one, two, three, four, five, six, or seven mutations selected from the group consisting of L84F, A106V, D108N, H123Y, D147Y, E155V, and I156F in TadA reference sequence, or a corresponding mutation or mutations in another adenosine deaminase. In some embodiments, the adenosine deaminase comprises one, two, three, four, five, or six mutations selected from the group consisting of S2A, I49F, A106V, D108N, D147Y, and E155V in TadA reference sequence.

[0442] In some embodiments, the adenosine deaminase comprises one, two, three, four, or five mutations selected from the group consisting of H8Y, A106T, D108N, N127S, and K160S in TadA reference sequence, or a corresponding mutation or mutations in another adenosine deaminase.

[0443] In some embodiments, the adenosine deaminase comprises one or more of a E25X, R26X, R107X, A142X, and/or A143X mutation in TadA reference sequence, or one or more corresponding mutations in another adenosine deaminase, where the presence of X indicates any amino acid other than the corresponding amino acid in the wild-type adenosine deaminase. In some embodiments, the adenosine deaminase comprises one or more of E25M, E25D, E25A, E25R, E25V, E25S, E25Y, R26G, R26N, R26Q, R26C, R26L, R26K, R107P, R107K, R107A, R107N, R107W, R107H, R107S, A142N, A142D, A142G, A143D, A143G, A143E, A143L, A143W, A143M, A143S, A143Q, and/or A143R mutation in TadA reference sequence, or one or more corresponding mutations in another adenosine deaminase. In some embodiments, the adenosine deaminase comprises one or more of the mutations described herein corresponding to TadA reference sequence, or one or more corresponding mutations in another adenosine deaminase.

[0444] In some embodiments, the adenosine deaminase comprises an E25X mutation in TadA reference sequence, or a corresponding mutation in another adenosine deaminase, where X indicates any amino acid other than the corresponding amino acid in the wild-type adenosine deaminase. In some embodiments, the adenosine deaminase comprises an E25M, E25D, E25A, E25R, E25V, E25S, or E25Y mutation in TadA reference sequence, or a corresponding mutation in another adenosine deaminase (e.g., ecTadA).

[0445] In some embodiments, the adenosine deaminase comprises an R26X mutation in TadA reference sequence, or a corresponding mutation in another adenosine deaminase, where X indicates any amino acid other than the corresponding amino acid in the wild-type adenosine deaminase. In some embodiments, the adenosine deaminase comprises R26G, R26N, R26Q, R26C, R26L, or R26K mutation in TadA reference sequence, or a corresponding mutation in another adenosine deaminase (e.g., ecTadA).

[0446] In some embodiments, the adenosine deaminase comprises an R107X mutation in TadA reference sequence, or a corresponding mutation in another adenosine deaminase, where X indicates any amino acid other than the corresponding amino acid in the wild-type adenosine deaminase. In some embodiments, the adenosine deaminase comprises an R107P, R107K, R107A, R107N, R107W, R107H, or R107S mutation in TadA reference sequence, or a corresponding mutation in another adenosine deaminase (e.g., ecTadA).

[0447] In some embodiments, the adenosine deaminase comprises an A142X mutation in TadA reference sequence, or a corresponding mutation in another adenosine deaminase, where X indicates any amino acid other than the corresponding amino acid in the wild-type adenosine deaminase. In some embodiments, the adenosine deaminase comprises an A142N, A142D, A142G, mutation in TadA reference sequence, or a corresponding mutation in another adenosine deaminase (e.g., ecTadA).

[0448] In some embodiments, the adenosine deaminase comprises an A143X mutation in TadA reference sequence, or a corresponding mutation in another adenosine deaminase, where X indicates any amino acid other than the corresponding amino acid in the wild-type adenosine deaminase. In some embodiments, the adenosine deaminase comprises an A143D, A143G, A143E, A143L, A143W, A143M, A143S, A143Q, and/or A143R mutation in TadA reference sequence, or a corresponding mutation in another adenosine deaminase (e.g., ecTadA).

[0449] In some embodiments, the adenosine deaminase comprises one or more of a H36X, N37X, P48X, I49X, R51X, M70X, N72X, D77X, E134X, S146X, Q154X, K157X, and/or K161X mutation in TadA reference sequence, or one or more corresponding mutations in another adenosine deaminase, where the presence of X indicates any amino acid other than the corresponding amino acid in the wild-type adenosine deaminase. In some embodiments, the adenosine deaminase comprises one or more of H36L, N37T, N37S, P48T, P48L, I49V, R51H, R51L, M70L, N72S, D77G, E134G, S146R, S146C, Q154H, K157N, and/or K161T mutation in TadA reference sequence, or one or more corresponding mutations in another adenosine deaminase (e.g., ecTadA).

[0450] In some embodiments, the adenosine deaminase comprises an H36X mutation in TadA reference sequence, or a corresponding mutation in another adenosine deaminase, where X indicates any amino acid other than the corresponding amino acid in the wild-type adenosine deaminase. In some embodiments, the adenosine deaminase comprises an H36L mutation in TadA reference sequence, or a corresponding mutation in another adenosine deaminase.

[0451] In some embodiments, the adenosine deaminase comprises an N37X mutation in TadA reference sequence, or a corresponding mutation in another adenosine deaminase, where X indicates any amino acid other than the corresponding amino acid in the wild-type adenosine deaminase. In some embodiments, the adenosine deaminase comprises an N37T or N37S mutation in TadA reference sequence, or a corresponding mutation in another adenosine deaminase.

[0452] In some embodiments, the adenosine deaminase comprises an P48X mutation in TadA reference sequence, or a corresponding mutation in another adenosine deaminase, where X indicates any amino acid other than the corresponding amino acid in the wild-type adenosine deaminase. In some embodiments, the adenosine deaminase comprises an P48T or P48L mutation in TadA reference sequence, or a corresponding mutation in another adenosine deaminase.

[0453] In some embodiments, the adenosine deaminase comprises an R51X mutation in TadA reference sequence, or a corresponding mutation in another adenosine deaminase, where X indicates any amino acid other than the corresponding amino acid in the wild-type adenosine deaminase. In some embodiments, the adenosine deaminase comprises an R51H or R51L mutation in TadA reference sequence, or a corresponding mutation in another adenosine deaminase.

[0454] In some embodiments, the adenosine deaminase comprises an S146X mutation in TadA reference sequence, or a corresponding mutation in another adenosine deaminase, where X indicates any amino acid other than the corresponding amino acid in the wild-type adenosine deaminase. In some embodiments, the adenosine deaminase comprises an S146R or S146C mutation in TadA reference sequence, or a corresponding mutation in another adenosine deaminase.

[0455] In some embodiments, the adenosine deaminase comprises an K157X mutation in TadA reference sequence, or a corresponding mutation in another adenosine deaminase, where X indicates any amino acid other than the corresponding amino acid in the wild-type adenosine deaminase. In some embodiments, the adenosine deaminase comprises a K157N mutation in TadA reference sequence, or a corresponding mutation in another adenosine deaminase.

[0456] In some embodiments, the adenosine deaminase comprises an P48X mutation in TadA reference sequence, or a corresponding mutation in another adenosine deaminase, where X indicates any amino acid other than the corresponding amino acid in the wild-type adenosine deaminase. In some embodiments, the adenosine deaminase comprises a P48S, P48T, or P48A mutation in TadA reference sequence, or a corresponding mutation in another adenosine deaminase.

[0457] In some embodiments, the adenosine deaminase comprises an A142X mutation in TadA reference sequence, or a corresponding mutation in another adenosine deaminase, where X indicates any amino acid other than the corresponding amino acid in the wild-type adenosine deaminase. In some embodiments, the adenosine deaminase comprises a A142N mutation in TadA reference sequence, or a corresponding mutation in another adenosine deaminase.

[0458] In some embodiments, the adenosine deaminase comprises an W23X mutation in TadA reference sequence, or a corresponding mutation in another adenosine deaminase, where X indicates any amino acid other than the corresponding amino acid in the wild-type adenosine deaminase. In some embodiments, the adenosine deaminase comprises a W23R or W23L mutation in TadA reference sequence, or a corresponding mutation in another adenosine deaminase.

[0459] In some embodiments, the adenosine deaminase comprises an R152X mutation in TadA reference sequence, or a corresponding mutation in another adenosine deaminase, where X indicates any amino acid other than the corresponding amino acid in the wild-type adenosine deaminase. In some embodiments, the adenosine deaminase comprises a R152P or R52H mutation in TadA reference sequence, or a corresponding mutation in another adenosine deaminase.

[0460] In one embodiment, the adenosine deaminase may comprise the mutations H36L, R51L, L84F, A106V, D108N, H123Y, S146C, D147Y, E155V, I156F, and K157N. In some embodiments, the adenosine deaminase comprises the following combination of mutations relative to TadA reference sequence, where each mutation of a combination is separated by a “_” and each combination of mutations is between parentheses:
[0461] (A106V_D108N),
[0462] (R107C_D108N),
[0463] (H8Y_D108N_N127S_D147Y_Q154H),
[0464] (H8Y_D108N_N127S_D147Y_E155V),
[0465] (D108N_D147Y_E155V),
[0466] (H8Y_D108N_N127S),
[0467] (H8Y_D108N_N127S_D147Y_Q154H),
[0468] (A106V_D108N_D147Y_E155V),
[0469] (D108Q_D147Y_E155V),
[0470] (D108M_D147Y_E155V),
[0471] (D108L_D147Y_E155V),
[0472] (D108K_D147Y_E155V),
[0473] (D108I_D147Y_E155V),
[0474] (D108F_D147Y_E155V),
[0475] (A106V_D108N_D147Y),
[0476] (A106V_D108M_D147Y_E155V),
[0477] (E59A_A106V_D108N_D147Y_E155V),
[0478] (E59A cat dead_A106V_D108N_D147Y_E155V),
[0479] (L84F_A106V_D108N_H123Y_D147Y_E155V_I156Y),
[0480] (L84F_A106V_D108N_H123Y_D147Y_E155V_I156F),
[0481] (D103A_D104N),
[0482] (G22P_D103A_D104N),
[0483] (D103A_D104N_S138A),
[0484] (R26G_L84F_A106V_R107H_D108N_H123Y_A142N_A143D_D147Y_E155V_I156F),
[0485] (E25G_R26G_L84F_A106V_R107H_D108N_H123Y_A142N_A143D_D147Y_E155V_I156F),
[0486] (E25D_R26G_L84F_A106V_R107K_D108N_H123Y_A142N_A143G_D147Y_E155V_I156F),
[0487] (R26Q_L84F_A106V_D108N_H123Y_A142N_D147Y_E155V_I156F),
[0488] (E25M_R26G_L84F_A106V_R107P_D108N_H123Y_A142N_A143D_D147Y_E155V_I156F),
[0489] (R26C_L84F_A106V_R107H_D108N_H123Y_A142N_D147Y_E155V_I156F),
[0490] (L84F_A106V_D108N_H123Y_A142N_A143L_D147Y_E155V_I156F),
[0491] (R26G_L84F_A106V_D108N_H123Y_A142N_D147Y_E155V_I156F),
[0492] (E25A_R26G_L84F_A106V_R107N_D108N_H123Y_A142N_A143E_D147Y_E155V_I156F),
[0493] (R26G_L84F_A106V_R107H_D108N_H123Y_A142N_A143D_D147Y_E155V_I156F),
[0494] (A106V_D108N_A142N_D147Y_E155V),
[0495] (R26G_A106V_D108N_A142N_D147Y_E155V),
[0496] (E25D_R26G_A106V_R107K_D108N_A142N_A143G_D147Y_E155V),
[0497] (R26G_A106V_D108N_R107H_A142N_A143D_D147Y_E155V),
[0498] (E25D_R26G_A106V_D108N_A142N_D147Y_E155V),
[0499] (A106V_R107K_D108N_A142N_D147Y_E155V),
[0500] (A106V_D108N_A142N_A143G_D147Y_E155V),
[0501] (A106V_D108N_A142N_A143L_D147Y_E155V),
[0502] (H36L_R51L_L84F_A106V_D108N_H123Y_S146C_D147Y_E155V_I156F_K157N),
[0503] (N37T_P48T_M70L_L84F_A106V_D108N_H123Y_D147Y_149V_E155V_I156F),
[0504] (N37S_L84F_A106V_D108N_H123Y_D147Y_E155V_I156F_K161T),
[0505] (H36L_L84F_A106V_D108N_H123Y_D147Y_Q154H_E155V_I156F),
[0506] (N72S_L84F_A106V_D108N_H123Y_S146R_D147Y_E155V_I156F),
[0507] (H36L_P48L_L84F_A106V_D108N_H123Y_E134G_D147Y_E155V_I156F),
[0508] (H36L_L84F_A106V_D108N_H123Y_D147Y_E155V_I156F_K157N)
[0509] (H36L_L84F_A106V_D108N_H123Y_S146C_D147Y_E155V_I156F),
[0510] (L84F_A106V_D108N_H123Y_S146R_D147Y_E155V_I156F_K161T),
[0511] (N37S_R51H_D77G_L84F_A106V_D108N_H123Y_D147Y_E155V_I156F),
[0512] (R51L_L84F_A106V_D108N_H123Y_D147Y_E155V_I156F_K157N),
[0513] (D24G_Q71R_L84F_H96L_A106V_D108N_H123Y_D147Y_E155V_I156F_K160E),
[0514] (H36L_G67V_L84F_A106V_D108N_H123Y_S146T_D147Y_E155V_I156F),
[0515] (Q71L_L84F_A106V_D108N_H123Y_L137M_A143E_D147Y_E155V_I156F),
[0516] (E25G_L84F_A106V_D108N_H123Y_D147Y_E155V_I156F_Q159L),
[0517] (L84F_A91T_F1041_A106V_D108N_H123Y_D147Y_E155V_I156F),
[0518] (N72D_L84F_A106V_D108N_H123Y_G125A_D147Y_E155V_I156F),
[0519] (P48S_L84F_S97C_A106V_D108N_H123Y_D147Y_E155V_I156F),
[0520] (W23G_L84F_A106V_D108N_H123Y_D147Y_E155V_I156F),
[0521] (D24G_P48L_Q71R_L84F_A106V_D108N_H123Y_D147Y_E155V_I156F_Q159L),
[0522] (L84F_A106V_D108N_H123Y_A142N_D147Y_E155V_I156F),
[0523] (H36L_R51L_L84F_A106V_D108N_H123Y_A142N_S146C_D147Y_E155V_I156F_K157N),
[0524] (N37S_L84F_A106V_D108N_H123Y_A142N_D147Y_E155V_I156F_K161T),
[0525] (L84F_A106V_D108N_D147Y_E155V_I156F),
[0526] (R51L_L84F_A106V_D108N_H123Y_S146C_D147Y_E155V_I156F_K157N_K161T),
[0527] (L84F_A106V_D108N_H123Y_S146C_D147Y_E155V_I156F_K161T),
[0528] (L84F_A106V_D108N_H123Y_S146C_D147Y_E155V_I156F_K157N_K160E_K161T),
[0529] (L84F_A106V_D108N_H123Y_S146C_D147Y_E155V_I156F_K157N_K160E),
[0530] (R74Q_L84F_A106V_D108N_H123Y_D147Y_E155V_I156F),
[0531] (R74A_L84F_A106V_D108N_H123Y_D147Y_E155V_I156F),
[0532] (L84F_A106V_D108N_H123Y_D147Y_E155V_I156F),
[0533] (R74Q_L84F_A106V_D108N_H123Y_D147Y_E155V_I156F),
[0534] (L84F_R98Q_A106V_D108N_H123Y_D147Y_E155V_I156F),
[0535] (L84F_A106V_D108N_H123Y_R129Q_D147Y_E155V_I156F),
[0536] (P48S_L84F_A106V_D108N_H123Y_A142N_D147Y_E155V_I156F),
[0537] (P48S_A142N),
[0538] (P48T_I49V_L84F_A106V_D108N_H123Y_A142N_D147Y_E155V_I156F_L157N),
[0539] (P48T_I49V_A142N),
[0540] (H36L_P48S_R51L_L84F_A106V_D108N_H123Y_S146C_D147Y_E155V_I156F_K157N),
[0541] (H36L_P48S_R51L_L84F_A106V_D108N_H123Y_S146C_A142N_D147Y_E155V_I156F
[0542] (H36L_P48T_I49V_R51L_L84F_A106V_D108N_H123Y_S146C_D147Y_E155V_I156F_K157N),
[0543] (H36L_P48T_I49V_R51L_L84F_A106V_D108N_H123Y_A142N_S146C_D147Y_E155V_I156F_K157N),
[0544] (H36L_P48A_R51L_L84F_A106V_D108N_H123Y_S146C_D147Y_E155V_I156F_K157N),
[0545] (H36L_P48A_R51L_L84F_A106V_D108N_H123Y_A142N_S146C_D147Y_E155V_I156F_K157N),
[0546] (H36L_P48A_R51L_L84F_A106V_D108N_H123Y_S146C_A142N_D147Y_E155V_I156F_K157N),
[0547] (W23L_H36L_P48A_R51L_L84F_A106V_D108N_H123Y_S146C_D147Y_E155V_I156F_K157N),
[0548] (W23R_H36L_P48A_R51L_L84F_A106V_D108N_H123Y_S146C_D147Y_E155V_I156F_K157N),
[0549] (W23L_H36L_P48A_R51L_L84F_A106V_D108N_H123Y_S146R_D147Y_E155V_I156F_K161T),
[0550] (H36L_P48A_R51L_L84F_A106V_D108N_H123Y_S146C_D147Y_R152H_E155V_I156F_K157N),
[0551] (H36L_P48A_R51L_L84F_A106V_D108N_H123Y_S146C_D147Y_R152P_E155V_I156F_K157N),
[0552] (W23L_H36L_P48A_R51L_L84F_A106V_D108N_H123Y_S146C_D147Y_R152P_E155V_I156F_K157N),
[0553] (W23L_H36L_P48A_R51L_L84F_A106V_D108N_H123Y_A142A_S146C_D147Y_E155V_I156F_K157N),
[0554] (W23L_H36L_P48A_R51L_L84F_A106V_D108N_H123Y_A142A_S146C_D147Y_R152P_E155V_I156F_K157N),
[0555] (W23L_H36L_P48A_R51L_L84F_A106V_D108N_H123Y_S146R_D147Y_E155V_I156F_K161T),
[0556] (W23R_H36L_P48A_R51L_L84F_A106V_D108N_H123Y_S146C_D147Y_R152P_E155V_I156F_K157N),
[0557] (H36L_P48A_R51L_L84F_A106V_D108N_H123Y_A142N_S146C_D147Y_R152P_E155V_I156F_K157N).

[0558] In some embodiments, the TadA deaminase is TadA variant. In some embodiments, the TadA variant is TadA*7.10. In particular embodiments, the fusion proteins comprise a single TadA*7.10 domain (e.g., provided as a monomer). In other embodiments, the fusion protein comprises TadA*7.10 and TadA(wt), which are capable of forming heterodimers. In one embodiment, a fusion protein as described herein comprises a wild-type TadA linked to TadA*7.10, which is linked to Cas9 nickase.

[0559] In some embodiments, TadA*7.10 comprises at least one alteration. In some embodiments, the adenosine deaminase comprises an alteration in the following sequence:

TadA*7.10
(SEQ ID NO: 1)
MSEVEFSHEYWMRHALTLAKRARDEREVPVGAVLVLNNRVIGEGWNRAIG
LHDPTAHAEIMALRQGGLVMQNYRLIDATLYVTFEPCVMCAGAMIHSRIG
RVVFGVRNAKTGAAGSLMDVLHYPGMNHRVEITEGILADECAALLCYFFR
MPRQVFNAQKKAQSSTD

[0560] In some embodiments, TadA*7.10 comprises an alteration at amino acid 82 and/or 166. In particular embodiments, TadA*7.10 comprises one or more of the following alterations: Y147T, Y147R, Q154S, Y123H, V82S, T166R, and/or Q154R. In other embodiments, a variant of TadA*7.10 comprises a combination of alterations selected from the group of: Y147T+Q154R; Y147T+Q154S; Y147R+Q154S; V82S+Q154S; V82S+Y147R; V82S+Q154R; V82S+Y123H; I76Y+V82S; V82S+Y123H+Y147T; V82S+Y123H+Y147R; V82S+Y123H+Q154R; Y147R+Q154R+Y123H; Y147R+Q154R+I76Y; Y147R+Q154R+T166R; Y123H+Y147R+Q154R+I76Y; V82S+Y123H+Y147R+Q154R; and I76Y+V82S+Y123H+Y147R+Q154R.

[0561] In some embodiments, a variant of TadA*7.10 comprises one or more of alterations selected from the group of L36H, I76Y, V82G, Y147T, Y147D, F149Y, Q154S, N157K, and/or D167N. In some embodiments, a variant of TadA*7.10 comprises V82G, Y147T/D, Q154S, and one or more of L36H, I76Y, F149Y, N157K, and D167N. In other embodiments, a variant of TadA*7.10 comprises a combination of alterations selected from the group of: V82G+Y147T+Q154S; I76Y+V82G+Y147T+Q154S; L36H+V82G+Y147T+Q154S+N157K; V82G+Y147D+F149Y+Q154S+D167N; L36H+V82G+Y147D+F149Y+Q154S+N157K+D167N; L36H+I76Y+V82G+Y147T+Q154S+N157K; I76Y+V82G+Y147D+F149Y+Q154S+D167N; L36H+I76Y+V82G+Y147D+F149Y+Q154S+N157K+D167N.

[0562] In some embodiments, an adenosine deaminase variant (e.g., TadA variant) comprises a deletion. In some embodiments, an adenosine deaminase variant comprises a deletion of the C terminus. In particular embodiments, an adenosine deaminase variant comprises a deletion of the C terminus beginning at residue 149, 150, 151, 152, 153, 154, 155, 156, and 157, relative to TadA*7.10, the TadA reference sequence, or a corresponding mutation in another TadA.

[0563] In other embodiments, an adenosine deaminase variant (e.g., TadA*8) is a monomer comprising one or more of the following alterations: Y147T, Y147R, Q154S, Y123H, V82S, T166R, and/or Q154R, relative to TadA*7.10, the TadA reference sequence, or a corresponding mutation in another TadA. In other embodiments, the adenosine deaminase variant (TadA*8) is a monomer comprising a combination of alterations selected from the group of: Y147T+Q154R; Y147T+Q154S; Y147R+Q154S; V82S+Q154S; V82S+Y147R; V82S+Q154R; V82S+Y123H; I76Y+V82S; V82S+Y123H+Y147T; V82S+Y123H+Y147R; V82S+Y123H+Q154R; Y147R+Q154R+Y123H; Y147R+Q154R+I76Y; Y147R+Q154R+T166R; Y123H+Y147R+Q154R+I76Y; V82S+Y123H+Y147R+Q154R; and I76Y+V82S+Y123H+Y147R+Q154R, relative to TadA*7.10, the TadA reference sequence, or a corresponding mutation in another TadA.

[0564] In other embodiments, a base editor of the disclosure comprising an adenosine deaminase variant (e.g., TadA*8) monomer comprising one or more of the following alterations: R26C, V88A, A109S, T111R, D119N, H122N, Y147D, F149Y, T166I and/or D167N, relative to TadA*7.10, the TadA reference sequence, or a corresponding mutation in another TadA. In other embodiments, the adenosine deaminase variant (TadA*8) monomer comprises a combination of alterations selected from the group of: R26C+A109S+T111R+D119N+H122N+Y147D+F149Y+T166I+D167N; V88A+A109S+T111R+D119N+H122N+F149Y+T166I+D167N; R26C+A109S+T111R+D119N+H122N+F149Y+T166I+D167N; V88A+T111R+D119N+F149Y; and A109S+T111R+D119N+H122N+Y147D+F149Y+T166I+D167N, relative to TadA*7.10, the TadA reference sequence, or a corresponding mutation in another TadA.

[0565] In some embodiments, an adenosine deaminase variant (e.g., MSP828) is a monomer comprising one or more of the following alterations L36H, I76Y, V82G, Y147T, Y147D, F149Y, Q154S, N157K, and/or D167N, relative to TadA*7.10, the TadA reference sequence, or a corresponding mutation in another TadA. In some embodiments, an adenosine deaminase variant (e.g., MSP828) is a monomer comprising V82G, Y147T/D, Q154S, and one or more of L36H, I76Y, F149Y, N157K, and D167N, relative to TadA*7.10, the TadA reference sequence, or a corresponding mutation in another TadA. In other embodiments, the adenosine deaminase variant (TadA variant) is a monomer comprising a combination of alterations selected from the group of: V82G+Y147T+Q154S; I76Y+V82G+Y147T+Q154S; L36H+V82G+Y147T+Q154S+N157K; V82G+Y147D+F149Y+Q154S+D167N; L36H+V82G+Y147D+F149Y+Q154S+N157K+D167N; L36H+I76Y+V82G+Y147T+Q154S+N157K; I76Y+V82G+Y147D+F149Y+Q154S+D167N; L36H+I76Y+V82G+Y147D+F149Y+Q154S+N157K+D167N, relative to TadA*7.10, the TadA reference sequence, or a corresponding mutation in another TadA.

[0566] In other embodiments, the adenosine deaminase variant is a homodimer comprising two adenosine deaminase domains (e.g., TadA*8) each having one or more of the following alterations Y147T, Y147R, Q154S, Y123H, V82S, T166R, and/or Q154R, relative to TadA*7.10, the TadA reference sequence, or a corresponding mutation in another TadA. In other embodiments, the adenosine deaminase variant is a homodimer comprising two adenosine deaminase domains (e.g., TadA*8) each having a combination of alterations selected from the group of: Y147T+Q154R; Y147T+Q154S; Y147R+Q154S; V82S+Q154S; V82S+Y147R; V82S+Q154R; V82S+Y123H; I76Y+V82S; V82S+Y123H+Y147T; V82S+Y123H+Y147R; V82S+Y123H+Q154R; Y147R+Q154R+Y123H; Y147R+Q154R+I76Y; Y147R+Q154R+T166R; Y123H+Y147R+Q154R+I76Y; V82S+Y123H+Y147R+Q154R; and I76Y+V82S+Y123H+Y147R+Q154R, relative to TadA*7.10, the TadA reference sequence, or a corresponding mutation in another TadA.

[0567] In other embodiments, a base editor of the disclosure comprising an adenosine deaminase variant (e.g., TadA*8) homodimer comprising two adenosine deaminase domains (e.g., TadA*8) each having one or more of the following alterations R26C, V88A, A109S, T111R, D119N, H122N, Y147D, F149Y, T166I and/or D167N, relative to TadA*7.10, the TadA reference sequence, or a corresponding mutation in another TadA. In other embodiments, the adenosine deaminase variant is a homodimer comprising two adenosine deaminase domains (e.g., TadA*8) each having a combination of alterations selected from the group of: R26C+A109S+T111R+D119N+H122N+Y147D+F149Y+T166I+D167N; V88A+A109S+T111R+D119N+H122N+F149Y+T166I+D167N; R26C+A109S+T111R+D119N+H122N+F149Y+T166I+D167N; V88A+T111R+D119N+F149Y; and A109S+T111R+D119N+H122N+Y147D+F149Y+T166I+D167N, relative to TadA*7.10, the TadA reference sequence, or a corresponding mutation in another TadA.

[0568] In some embodiments, an adenosine deaminase variant is a homodimer comprising two adenosine deaminase domains (e.g., TadA*7.10) each having one or more of the following alterations L36H, I76Y, V82G, Y147T, Y147D, F149Y, Q154S, N157K, and/or D167N, relative to TadA*7.10, the TadA reference sequence, or a corresponding mutation in another TadA. In some embodiments, an adenosine deaminase variant is a homodimer comprising two adenosine deaminase variant domains (e.g., MSP828) each having the following alterations V82G, Y147T/D, Q154S, and one or more of L36H, I76Y, F149Y, N157K, and D167N, relative to TadA*7.10, the TadA reference sequence, or a corresponding mutation in another TadA. In other embodiments, the adenosine deaminase variant is a homodimer comprising two adenosine deaminase domains (e.g., TadA*7.10) each having a combination of alterations selected from the group of: V82G+Y147T+Q154S; I76Y+V82G+Y147T+Q154S; L36H+V82G+Y147T+Q154S+N157K; V82G+Y147D+F149Y+Q154S+D167N; L36H+V82G+Y147D+F149Y+Q154S+N157K+D167N; L36H+I76Y+V82G+Y147T+Q154S+N157K; I76Y+V82G+Y147D+F149Y+Q154S+D167N; L36H+I76Y+V82G+Y147D+F149Y+Q154S+N157K+D167N, relative to TadA*7.10, the TadA reference sequence, or a corresponding mutation in another TadA.

[0569] In other embodiments, the adenosine deaminase variant is a heterodimer of a wild-type adenosine deaminase domain and an adenosine deaminase variant domain (e.g., TadA*8) comprising one or more of the following alterations Y147T, Y147R, Q154S, Y123H, V82S, T166R, and/or Q154R, relative to TadA*7.10, the TadA reference sequence, or a corresponding mutation in another TadA. In other embodiments, the adenosine deaminase variant is a heterodimer of a wild-type adenosine deaminase domain and an adenosine deaminase variant domain (e.g., TadA*8) comprising a combination of alterations selected from the group of: Y147T+Q154R; Y147T+Q154S; Y147R+Q154S; V82S+Q154S; V82S+Y147R; V82S+Q154R; V82S+Y123H; I76Y+V82S; V82S+Y123H+Y147T; V82S+Y123H+Y147R; V82S+Y123H+Q154R; Y147R+Q154R+Y123H; Y147R+Q154R+I76Y; Y147R+Q154R+T166R; Y123H+Y147R+Q154R+I76Y; V82S+Y123H+Y147R+Q154R; and I76Y+V82S+Y123H+Y147R+Q154R, relative to TadA*7.10, the TadA reference sequence, or a corresponding mutation in another TadA.

[0570] In other embodiments, a base editor comprises a heterodimer of a wild-type adenosine deaminase domain and an adenosine deaminase variant domain (e.g., TadA*8) comprising one or more of the following alterations R26C, V88A, A109S, T111R, D119N, H122N, Y147D, F149Y, T166I and/or D167N, relative to TadA*7.10, the TadA reference sequence, or a corresponding mutation in another TadA. In other embodiments, the base editor comprises a heterodimer of a wild-type adenosine deaminase domain and an adenosine deaminase variant domain (e.g., TadA*8) comprising a combination of alterations selected from the group of: R26C+A109S+T111R+D119N+H122N+Y147D+F149Y+T166I+D167N; V88A+A109S+T111R+D119N+H122N+F149Y+T166I+D167N; R26C+A109S+T111R+D119N+H122N+F149Y+T166I+D167N; V88A+T111R+D119N+F149Y; and A109S+T111R+D119N+H122N+Y147D+F149Y+T166I+D167N, relative to TadA*7.10, the TadA reference sequence, or a corresponding mutation in another TadA.

[0571] In other embodiments, the adenosine deaminase variant is a heterodimer of a wild-type adenosine deaminase domain and an adenosine deaminase variant domain (e.g., TadA*7.10) comprising one or more of the following alterations L36H, I76Y, V82G, Y147T, Y147D, F149Y, Q154S, N157K, and/or D167N, relative to TadA*7.10, the TadA reference sequence, or a corresponding mutation in another TadA. In some embodiments, an adenosine deaminase variant is a heterodimer comprising a wild-type adenosine deaminase domain and an adenosine deaminase variant domain (e.g., MSP828) having the following alterations V82G, Y147T/D, Q154S, and one or more of L36H, I76Y, F149Y, N157K, and D167N, relative to TadA*7.10, the TadA reference sequence, or a corresponding mutation in another TadA. In other embodiments, the adenosine deaminase variant is a heterodimer of a wild-type adenosine deaminase domain and an adenosine deaminase variant domain (e.g., TadA*7.10) comprising a combination of alterations selected from the group of: V82G+Y147T+Q154S; I76Y+V82G+Y147T+Q154S; L36H+V82G+Y147T+Q154S+N157K; V82G+Y147D+F149Y+Q154S+D167N; L36H+V82G+Y147D+F149Y+Q154S+N157K+D167N; L36H+I76Y+V82G+Y147T+Q154S+N157K; I76Y+V82G+Y147D+F149Y+Q154S+D167N; L36H+I76Y+V82G+Y147D+F149Y+Q154S+N157K+D167N, relative to TadA*7.10, the TadA reference sequence, or a corresponding mutation in another TadA.

[0572] In other embodiments, the adenosine deaminase variant is a heterodimer of a TadA*7.10 domain and an adenosine deaminase variant domain (e.g., TadA*8) comprising one or more of the following alterations Y147T, Y147R, Q154S, Y123H, V82S, T166R, and/or Q154R, relative to TadA*7.10, the TadA reference sequence, or a corresponding mutation in another TadA. In other embodiments, the adenosine deaminase variant is a heterodimer of a TadA*7.10 domain and an adenosine deaminase variant domain (e.g., TadA*8) comprising a combination of alterations selected from the group of: Y147T+Q154R; Y147T+Q154S; Y147R+Q154S; V82S+Q154S; V82S+Y147R; V82S+Q154R; V82S+Y123H; I76Y+V82S; V82S+Y123H+Y147T; V82S+Y123H+Y147R; V82S+Y123H+Q154R; Y147R+Q154R+Y123H; Y147R+Q154R+176Y; Y147R+Q154R+T166R; Y123H+Y147R+Q154R+I76Y; V82S+Y123H+Y147R+Q154R; and I76Y+V82S+Y123H+Y147R+Q154R, relative to TadA*7.10, the TadA reference sequence, or a corresponding mutation in another TadA.

[0573] In other embodiments, a base editor comprises a heterodimer of a TadA*7.10 domain and an adenosine deaminase variant domain (e.g., TadA*8) comprising one or more of the following alterations R26C, V88A, A109S, T111R, D119N, H122N, Y147D, F149Y, T166I and/or D167N, relative to TadA*7.10, the TadA reference sequence, or a corresponding mutation in another TadA. In other embodiments, the base editor comprises a heterodimer of a TadA*7.10 domain and an adenosine deaminase variant domain (e.g., TadA*8) comprising a combination of alterations selected from the group of: R26C+A109S+T111R+D119N+H122N+Y147D+F149Y+T166I+D167N; V88A+A109S+T111R+D119N+H122N+F149Y+T166I+D167N; R26C+A109S+T111R+D119N+H122N+F149Y+T166I+D167N; V88A+T111R+D119N+F149Y; and A109S+T111R+D119N+H122N+Y147D+F149Y+T166I+D167N, relative to TadA*7.10, the TadA reference sequence, or a corresponding mutation in another TadA.

[0574] In other embodiments, the adenosine deaminase variant is a heterodimer of a TadA*7.10 domain and an adenosine deaminase variant domain (e.g., TadA*7.10) comprising one or more of the following alterations L36H, I76Y, V82G, Y147T, Y147D, F149Y, Q154S, N157K, and/or D167N, relative to TadA*7.10, the TadA reference sequence, or a corresponding mutation in another TadA. In some embodiments, an adenosine deaminase variant is a heterodimer comprising a TadA*7.10 domain and an adenosine deaminase variant domain (e.g., MSP828) having the following alterations V82G, Y147T/D, Q154S, and one or more of L36H, I76Y, F149Y, N157K, and D167N, relative to TadA*7.10, the TadA reference sequence, or a corresponding mutation in another TadA. In other embodiments, the adenosine deaminase variant is a heterodimer of a TadA*7.10 domain and an adenosine deaminase variant domain (e.g., TadA*7.10) comprising a combination of alterations selected from the group of: V82G+Y147T+Q154S; I76Y+V82G+Y147T+Q154S; L36H+V82G+Y147T+Q154S+N157K; V82G+Y147D+F149Y+Q154S+D167N; L36H+V82G+Y147D+F149Y+Q154S+N157K+D167N; L36H+I76Y+V82G+Y147T+Q154S+N157K; I76Y+V82G+Y147D+F149Y+Q154S+D167N; L36H+I76Y+V82G+Y147D+F149Y+Q154S+N157K+D167N, relative to TadA*7.10, the TadA reference sequence, or a corresponding mutation in another TadA.

[0575] In some embodiments, the TadA*8 is a variant as shown in Tables 8A, 10, 11, or 13. Tables 8A, 10, 11, and 13 show certain amino acid position numbers in the TadA amino acid sequence and the amino acids present in those positions in the TadA-7.10 adenosine deaminase. Tables 8A, 10, 11, and 13 also show amino acid changes in TadA variants relative to TadA-7.10 following phage-assisted non-continuous evolution (PANCE) and phage-assisted continuous evolution (PACE), as described in M. Richter et al., 2020, Nature Biotechnology, doi.org/10.1038/s41587-020-0453-z, the entire contents of which are incorporated by reference herein. In some embodiments, the TadA*8 is TadA*8a, TadA*8b, TadA*8c, TadA*8d, or TadA*8e. In some embodiments, the TadA*8 is TadA*8e.

[0576] In particular embodiments, an adenosine deaminase heterodimer can comprise a TadA*8 domain and an adenosine deaminase domain selected from Staphylococcus aureus (S. aureus) TadA, Bacillus subtilis (B. subtilis) TadA, Salmonella typhimurium (S. typhimurium) TadA, Shewanella putrefaciens (S. putrefaciens) TadA, Haemophilus influenzae F3031 (H. influenzae) TadA, Caulobacter crescentus (C. crescentus) TadA, Geobacter sulfurreducens (G. sulfurreducens) TadA, or TadA*7.10.

In some embodiments, an adenosine deaminase is a TadA*8. In one embodiment, an adenosine deaminase is a TadA*8 that comprises or consists essentially of the following sequence or a fragment thereof having adenosine deaminase activity:

(SEQ ID NO: 316)
MSEVEFSHEYWMRHALTLAKRARDEREVPVGAVLVLNNRVIGEGWNRAIG
LHDPTAHAEIMALRQGGLVMQNYRLIDATLYVTFEPCVMCAGAMIHSRIG
RVVFGVRNAKTGAAGSLMDVLHYPGMNHRVEITEGILADECAALLCTFFR
MPRQVFNAQKKAQSSTD

[0577] In some embodiments, the TadA*8 is truncated. In some embodiments, the truncated TadA*8 is missing 1, 2, 3, 4, 5, 6, 7, 8, 9, 10, 11, 12, 13, 14, 15, 6, 17, 18, 19, or 20 N-terminal amino acid residues relative to the full length TadA*8. In some embodiments, the truncated TadA*8 is missing 1, 2, 3, 4, 5, 6, 7, 8, 9, 10, 11, 12, 13, 14, 15, 6, 17, 18, 19, or 20 C-terminal amino acid residues relative to the full length TadA*8. In some embodiments the adenosine deaminase variant is a full-length TadA*8.

[0578] In one embodiment, a fusion protein as described and/or exemplified herein comprises a wild-type TadA is linked to an adenosine deaminase variant described herein (e.g., TadA*8), which is linked to Cas9 nickase. In particular embodiments, the fusion proteins comprise a single TadA*8 domain (e.g., provided as a monomer). In other embodiments, the base editor comprises TadA*8 and TadA(wt), which are capable of forming heterodimers.

[0579] In some embodiments the TadA*8 is TadA*8.1, TadA*8.2, TadA*8.3, TadA*8.4, TadA*8.5, TadA*8.6, TadA*8.7, TadA*8.8, TadA*8.9, TadA*8.10, TadA*8.11, TadA*8.12, TadA*8.13, TadA*8.14, TadA*8.15, TadA*8.16, TadA*8.17, TadA*8.18, TadA*8.19, TadA*8.20, TadA*8.21, TadA*8.22, TadA*8.23, or TadA*8.24

TABLE 8A
Additional TadA*8 Variants

| | | TadA amino acid number | | | | | | | | | |
|---|---|---|---|---|---|---|---|---|---|---|---|
| | TadA | 26 | 88 | 109 | 111 | 119 | 122 | 147 | 149 | 166 1 | 167 |
| | TadA-7.10 | R | V | A | T | D | H | Y | F | T | D |
| PANCE 1 | | | | | R | | | | | | |
| PANCE 2 | | | | S/T | R | | | | | | |
| PACE | TadA-8a | C | | S | R | N | N | D | Y | I | N |
| | TadA-8b | | A | S | R | N | N | | Y | I | N |
| | TadA-8c | C | | S | R | N | N | | Y | I | N |
| | TadA-8d | | A | | R | N | | | Y | | |
| | TadA-8e | | | S | R | N | N | D | Y | I | N |

[0580] In some embodiments, the TadA variant is a variant as shown in Table 8B. Table 8B shows certain amino acid position numbers in the TadA amino acid sequence and the amino acids present in those positions in the TadA*7.10 adenosine deaminase. In some embodiments, the TadA variant is MSP605, MSP680, MSP823, MSP824, MSP825, MSP827, MSP828, or MSP829. In some embodiments, the TadA variant is MSP828. In some embodiments, the TadA variant is MSP829.

TABLE 8B
TadA Variants

| | TadA Amino Acid Number | | | | | | | |
|---|---|---|---|---|---|---|---|---|
| Variant | 36 | 76 | 82 | 147 | 149 | 154 | 157 | 167 |
| TadA-7.10 | L | I | V | Y | F | Q | N | D |
| MSP605 | | | G | T | | S | | |
| MSP680 | | Y | G | T | | S | | |
| MSP823 | H | | G | T | | S | K | |
| MSP824 | | | G | D | Y | S | | N |
| MSP825 | H | | G | D | Y | S | K | N |
| MSP827 | H | Y | G | T | | S | K | |
| MSP828 | | Y | G | D | Y | S | | N |
| MSP829 | H | Y | G | D | Y | S | K | N |

[0581] In one embodiment, a fusion protein as described herein comprises a wild-type TadA is linked to an adenosine deaminase variant described herein, which is linked to Cas9 nickase. In particular embodiments, the fusion proteins comprise a single variant TadA domain (e.g., provided as a monomer). In other embodiments, the fusion protein comprises a variant TadA and TadA(wt), which are capable of forming heterodimers.

[0582] In some embodiments, the TadA variant is truncated. In some embodiments, the truncated TadA is missing 1, 2, 3, 4, 5, 6, 7, 8, 9, 10, 11, 12, 13, 14, 15, 6, 17, 18, 19, or 20 N-terminal amino acid residues relative to the full length TadA variant. In some embodiments, the truncated TadA variant is missing 1, 2, 3, 4, 5, 6, 7, 8, 9, 10, 11, 12, 13, 14, 15, 6, 17, 18, 19, or 20 C-terminal amino acid residues relative to the full length TadA variant. In some embodiments the adenosine deaminase variant is a full-length TadA variant.

[0583] In particular embodiments, a TadA*8 comprises one or more mutations at any of the following positions shown in bold. In other embodiments, a TadA*8 comprises one or more mutations at any of the positions shown with underlining:

(SEQ ID NO: 1)
MSEVEFSHEY WMRHALTLAK RARDEREVPV GAVLVLNNRV
IGEGWNRAIG⁵⁰
LHDPTAHAEI MALRQGGLVM QNYRLIDATL YVTFEPCVMC
AGAMIHSRIG¹⁰⁰
RVVFGVRNAK TGAAGSLMDV LHYPGMNHRV EITEGILADE
CAALLCYFFR¹⁵⁰
MPRQVFNAQK KAQSSTD

[0584] For example, the TadA*8 comprises alterations at amino acid position 82 and/or 166 (e.g., V82S, T166R) alone or in combination with any one or more of the following Y147T, Y147R, Q154S, Y123H, and/or Q154R, relative to TadA*7.10, the TadA reference sequence, or a corresponding mutation in another TadA.

[0585] In particular embodiments, a combination of alterations is selected from the group of: Y147T+Q154R; Y147T+Q154S; Y147R+Q154S; V82S+Q154S; V82S+Y147R; V82S+Q154R; V82S+Y123H; I76Y+V82S; V82S+Y123H+Y147T; V82S+Y123H+Y147R; V82S+Y123H+Q154R; Y147R+Q154R+Y123H; Y147R+Q154R+I76Y; Y147R+Q154R+T166R; Y123H+Y147R+Q154R+I76Y; V82S+Y123H+Y147R+Q154R; and I76Y+V82S+Y123H+Y147R+Q154R, relative to TadA*7.10, the TadA reference sequence, or a corresponding mutation in another TadA. In some embodiments, an adenosine deaminase comprises one or more of the following alterations: R21N, R23H, E25F, N38G, L51W, P54C, M70V, Q71M, N72K, Y73S, V82T, M94V, P124W, T133K, D139L, D139M, C146R, and A158K.

[0586] In some embodiments, an adenosine deaminase comprises one or more of the following combinations of alterations: V82S+Q154R+Y147R; V82S+Q154R+Y123H; V82S+Q154R+Y147R+Y123H; Q154R+Y147R+Y123H+I76Y+V82S; V82S+I76Y; V82S+Y147R; V82S+Y147R+Y123H; V82S+Q154R+Y123H; Q154R+Y147R+Y123H+I76Y; V82S+Y147R; V82S+Y147R+Y123H; V82S+Q154R+Y123H; V82S+Q154R+Y147R; V82S+Q154R+Y147R; Q154R+Y147R+Y123H+I76Y; Q154R+Y147R+Y123H+I76Y+V82S; I76Y_V82S_Y123H_Y147R_Q154R; Y147R+Q154R+H123H; and V82S+Q154R.

[0587] In some embodiments, an adenosine deaminase comprises one or more of the following combinations of alterations: E25F+V82S+Y123H, T133K+Y147R+Q154R; E25F+V82S+Y123H+Y147R+Q154R; L51W+V82S+Y123H+C146R+Y147R+Q154R; Y73S+V82S+Y123H+Y147R+Q154R; P54C+V82S+Y123H+Y147R+Q154R; N38G+V82T+Y123H+Y147R+Q154R; N72K+V82S+Y123H+D139L+Y147R+Q154R; E25F+V82S+Y123H+D139M+Y147R+Q154R; Q71M+V82S+Y123H+Y147R+Q154R; E25F+V82S+Y123H+T133K+Y147R+Q154R; E25F+V82S+Y123H+Y147R+Q154R; V82S+Y123H+P124W+Y147R+Q154R; L51W+V82S+Y123H+C146R+Y147R+Q154R; P54C+V82S+Y123H+Y147R+Q154R; Y73S+V82S+Y123H+Y147R+Q154R; N38G+V82T+Y123H+Y147R+Q154R; R23H+V82S+Y123H+Y147R+Q154R; R21N+V82S+Y123H+Y147R+Q154R; V82S+Y123H+Y147R+Q154R+A158K; N72K+V82S+Y123H+D139L+Y147R+Q154R; E25F+V82S+Y123H+D139M+Y147R+Q154R; and M70V+V82S+M94V+Y123H+Y147R+Q154R

[0588] In some embodiments, an adenosine deaminase comprises one or more of the following combinations of alterations: Q71M+V82S+Y123H+Y147R+Q154R; E25F+I76Y+V82S+Y123H+Y147R+Q154R; I76Y+V82T+Y123H+Y147R+Q154R; N38G+I76Y+V82S+Y123H+Y147R+Q154R; R23H+I76Y+V82S+Y123H+Y147R+Q154R; P54C+I76Y+V82S+Y123H+Y147R+Q154R; R21N+I76Y+V82S+Y123H+Y147R+Q154R; I76Y+V82S+Y123H+D139M+Y147R+Q154R; Y73S+I76Y+V82S+Y123H+Y147R+Q154R; E25F+I76Y+V82S+Y123H+Y147R+Q154R; I76Y+V82T+Y123H+Y147R+Q154R; N38G+I76Y+V82S+Y123H+Y147R+Q154R; R23H+I76Y+V82S+Y123H+Y147R+Q154R; P54C+I76Y+V82S+Y123H+Y147R+Q154R; R21N+I76Y+V82S+Y123H+Y147R+Q154R; I76Y+V82S+Y123H+D139M+Y147R+Q154R; Y73S+I76Y+V82S+Y123H+Y147R+Q154R; and V82S+Q154R; N72K_V82S+Y123H+Y147R+Q154R; Q71M_V82S+Y123H+Y147R+Q154R; V82S+Y123H+T133K+Y147R+Q154R; V82S+Y123H+T133K+Y147R+Q154R+A158K; M70V+Q71M+N72K+V82S+Y123H+Y147R+Q154R; N72K_V82S+Y123H+Y147R+Q154R; Q71M_V82S+Y123H+Y147R+Q154R; M70V+V82S+M94V+Y123H+Y147R+Q154R; V82S+Y123H+T133K+Y147R+Q154R; V82S+Y123H+T133K+Y147R+Q154R+A158K; and M70V+Q71M+N72K+V82S+Y123H+Y147R+Q154R. In some embodiments, the adenosine deaminase is expressed as a monomer. In other embodiments, the adenosine deaminase is expressed as a heterodimer. In some embodiments, the deaminase or other polypeptide sequence lacks a methionine, for example when included as a component of a fusion protein. This can alter the numbering of positions. However, the skilled person will understand that such corresponding mutations refer to the same mutation, e.g., Y73S and Y72S and D139M and D138M.

[0589] In some embodiments, the TadA*9 variant is a monomer. In some embodiments, the TadA*9 variant is a heterodimer with a wild-type TadA adenosine deaminase. In some embodiments, the TadA*9 variant is a heterodimer with another TadA variant (e.g., TadA*8, TadA*9). Additional details of TadA*9 adenosine deaminases are described in International PCT Application No. PCT/2020/049975, which is incorporated herein by reference in its entirety. In one embodiment, a fusion protein as described herein comprises a wild-type TadA is linked to an adenosine deaminase variant described herein (e.g., TadA variant), which is linked to Cas9 nickase. In particular embodiments, the fusion proteins comprise a single TadA variant domain (e.g., provided as a monomer). In other embodiments, the base editor comprises TadA*8 and TadA(wt), which are capable of forming heterodimers.

[0590] In particular embodiments, the fusion proteins comprise a single (e.g., provided as a monomer) TadA variant domain. In some embodiments, the TadA variant is linked to a Cas9 nickase. In some embodiments, the fusion proteins described herein comprise as a heterodimer of a wild-type TadA (TadA(wt)) linked to a TadA variant. In other embodiments, the fusion proteins described herein comprise as a heterodimer of a TadA*7.10 linked to a TadA variant. In some embodiments, the fusion protein comprises a TadA variant monomer. In some embodiments, the fusion protein comprises a heterodimer of a TadA variant and a TadA(wt). In some embodiments, the fusion protein comprises a heterodimer of a TadA variant and TadA*7.10. In some embodiments, the fusion protein comprises a heterodimer of two TadA variants. In some embodiments, the TadA variant is selected from Table 8A, 8B, 9, 10, 11, 12, 13, 14A, 14B, 18, or 20 infra or any other TadA variant provided herein.

[0591] In some embodiments, the deaminase or other polypeptide sequence lacks a methionine, for example when included as a component of a fusion protein. This can alter the numbering of positions. However, the skilled person will understand that such corresponding mutations refer to the same mutation.

[0592] Any of the mutations provided herein and any additional mutations (e.g., based on the ecTadA amino acid sequence) can be introduced into any other adenosine deaminases. Any of the mutations provided herein can be made individually or in any combination in TadA reference sequence or another adenosine deaminase (e.g., ecTadA).

[0593] Details of A to G nucleobase editing proteins are described in International PCT Application No. PCT/2017/045381 (WO2018/027078) and Gaudelli, N. M., et al., “Programmable base editing of A·T to G·C in genomic DNA without DNA cleavage” Nature, 551, 464-471 (2017), the entire contents of which are hereby incorporated by reference.

High Fidelity Cas9 Domains Some aspects of the disclosure provide high fidelity Cas9 domains. In some embodiments, high fidelity Cas9 domains are engineered Cas9 domains comprising one or more mutations that decrease electrostatic interactions between the Cas9 domain and a sugar-phosphate backbone of a DNA, as compared to a corresponding wild-type Cas9 domain. Without wishing to be bound by any particular theory, high fidelity Cas9 domains that have decreased electrostatic interactions with a sugar-phosphate backbone of DNA may have less off-target effects. In some embodiments, a Cas9 domain (e.g., a wild type Cas9 domain) comprises one or more mutations that decreases the association between the Cas9 domain and a sugar-phosphate backbone of a DNA. In some embodiments, a Cas9 domain comprises one or more mutations that decreases the association between the Cas9 domain and a sugar-phosphate backbone of a DNA by at least 1%, at least 2%, at least 3%, at least 4%, at least 5%, at least 10%, at least 15%, at least 20%, at least 25%, at least 30%, at least 35%, at least 40%, at least 45%, at least 50%, at least 55%, at least 60%, at least 65%, or at least 70%.

[0594] In some embodiments, any of the Cas9 fusion proteins provided herein comprise one or more of a N497X, a R661X, a Q695X, and/or a Q926X mutation, or a corresponding mutation in any of the amino acid sequences provided herein, wherein X is any amino acid. In some embodiments, any of the Cas9 fusion proteins provided herein comprise one or more of a N497A, a R661A, a Q695A, and/or a Q926A mutation, or a corresponding mutation in any of the amino acid sequences provided herein. In some embodiments, the Cas9 domain comprises a D10A mutation, or a corresponding mutation in any of the amino acid sequences provided herein. Cas9 domains with high fidelity are known in the art and would be apparent to the skilled artisan. For example, Cas9 domains with high fidelity have been described in Kleinstiver, B. P., et al. “High-fidelity CRISPR-Cas9 nucleases with no detectable genome-wide off-target effects.” Nature 529, 490-495 (2016); and Slaymaker, I. M., et al. “Rationally engineered Cas9 nucleases with improved specificity.” Science 351, 84-88 (2015); the entire contents of each are incorporated herein by reference. An Exemplary high fidelity Cas9 domain is provided in the Sequence Listing as SEQ ID NO: 233. In some embodiments, high fidelity Cas9 domains are engineered Cas9 domains comprising one or more mutations that decrease electrostatic interactions between the Cas9 domain and the sugar-phosphate backbone of a DNA, relative to a corresponding wild-type Cas9 domain. High fidelity Cas9 domains that have decreased electrostatic interactions with the sugar-phosphate backbone of DNA have less off-target effects. In some embodiments, the Cas9 domain (e.g., a wild type Cas9 domain (SEQ ID NOs: 197 and 200)) comprises one or more mutations that decrease the association between the Cas9 domain and the sugar-phosphate backbone of a DNA. In some embodiments, a Cas9 domain comprises one or more mutations that decreases the association between the Cas9 domain and the sugar-phosphate backbone of DNA by at least 1%, at least 2%, at least 3%, at least 4%, at least 5%, at least 10%, at least 15%, at least 20%, at least 25%, at least 30%, at least 35%, at least 40%, at least 45%, at least 50%, at least 55%, at least 60%, at least 65%, or at least 70%.

[0595] In some embodiments, the modified Cas9 is a high fidelity Cas9 enzyme. In some embodiments, the high fidelity Cas9 enzyme is SpCas9(K855A), eSpCas9(1.1), SpCas9-HF1, or hyper accurate Cas9 variant (HypaCas9). The modified Cas9 eSpCas9(1.1) contains alanine substitutions that weaken the interactions between the HNH/RuvC groove and the non-target DNA strand, preventing strand separation and cutting at off-target sites. Similarly, SpCas9-HF1 lowers off-target editing through alanine substitutions that disrupt Cas9's interactions with the DNA phosphate backbone. HypaCas9 contains mutations (SpCas9 N692A/M694A/Q695A/H698A) in the REC3 domain that increase Cas9 proofreading and target discrimination. All three high fidelity enzymes generate less off-target editing than wildtype Cas9.

[0596] An exemplary high fidelity Cas9 is provided below. High Fidelity Cas9 domain 15 mutations relative to Cas9 are shown in bold and underlined.

(SEQ ID NO: 233)
DKKYSIGLAIGTNSVGWAVITDEYKVPSKKFKVLGNTDRHSIKKNLIGAL
LFDSGETAEATRLKRTARRRYTRRKNRICYLQEIFSNEMAKVDDSFFHRL
EESFLVEEDKKHERHPIFGNIVDEVAYHEKYPTIYHLRKKLVDSTDKADL
RLIYLALAHMIKFRGHFLIEGDLNPDNSDVDKLFIQLVQTYNQLFEENPI
NASGVDAKAILSARLSKSRRLENLIAQLPGEKKNGLFGNLIALSLGLTPN
FKSNFDLAEDAKLQLSKDTYDDDLDNLLAQIGDQYADLFLAAKNLSDAIL
LSDILRVNTEITKAPLSASMIKRYDEHHQDLTLLKALVRQQLPEKYKEIF
FDQSKNGYAGYIDGGASQEEFYKFIKPILEKMDGTEELLVKLNREDLLRK
QRTFDNGSIPHQIHLGELHAILRRQEDFYPFLKDNREKIEKILTFRIPYY
VGPLARGNSRFAWMTRKSEETITPWNFEEVVDKGASAQSFIERMTAFDKN
LPNEKVLPKHSLLYEYFTVYNELTKVKYVTEGMRKPAFLSGEQKKAIVDL
LFKTNRKVTVKQLKEDYFKKIECFDSVEISGVEDRFNASLGTYHDLLKII
KDKDFLDNEENEDILEDIVLTLTLFEDREMIEERLKTYAHLFDDKVMKQL
KRRRYTGWGALSRKLINGIRDKQSGKTILDFLKSDGFANRNFMALIHDDS
LTFKEDIQKAQVSGQGDSLHEHIANLAGSPAIKKGILQTVKVVDELVKVM
GRHKPENIVIEMARENQTTQKGQKNSRERMKRIEEGIKELGSQILKEHPV
ENTQLQNEKLYLYYLQNGRDMYVDQELDINRLSDYDVDHIVPQSFLKDDS
IDNKVLTRSDKNRGKSDNVPSEEVVKKMKNYWRQLLNAKLITQRKFDNLT
KAERGGLSELDKAGFIKRQLVETRAITKHVAQILDSRMNTKYDENDKLIR
EVKVITLKSKLVSDFRKDFQFYKVREINNYHHAHDAYLNAVVGTALIKKY
PKLESEFVYGDYKVYDVRKMIAKSEQEIGKATAKYFFYSNIMNFFKTEIT
LANGEIRKRPLIETNGETGEIVWDKGRDFATVRKVLSMPQVNIVKKTEVQ
TGGFSKESILPKRNSDKLIARKKDWDPKKYGGFDSPTVAYSVLVVAKVEK
GKSKKLKSVKELLGITIMERSSFEKNPIDFLEAKGYKEVKKDLIIKLPKY
SLFELENGRKRMLASAGELQKGNELALPSKYVNFLYLASHYEKLKGSPED
NEQKQLFVEQHKHYLDEIIEQISEFSKRVILADANLDKVLSAYNKHRDKP
IREQAENIIHLFTLTNLGAPAAFKYFDTTIDRKRYTSTKEVLDATLIHQS
ITGLYETRIDLSQLGGD

Fusion Proteins Comprising a NapDNAbp and a Cytidine Deaminase and/or Adenosine Deaminase

[0597] Some aspects of the disclosure provide fusion proteins comprising a Cas9 domain or other nucleic acid programmable DNA binding protein (e.g., Cas12) and one or more cytidine deaminase and/or adenosine deaminase domains. It should be appreciated that the Cas9 domain may be any of the Cas9 domains or Cas9 proteins (e.g., dCas9 or nCas9) provided herein. In some embodiments, any of the Cas9 domains or Cas9 proteins (e.g., dCas9 or nCas9) provided herein may be fused with any of the cytidine deaminases and/or adenosine deaminases provided herein. The domains of the base editors disclosed herein can be arranged in any order.

[0598] In some embodiments, the fusion protein comprises the following domains A-C, A-D, or A-E:
[0599] NH₂-[A-B-C]-COOH;
[0600] NH₂-[A-B-C-D]-COOH; or
[0601] NH₂-[A-B-C-D-E]-COOH;
   wherein A and C or A, C, and E, each comprises one or more of the following:
[0602] an adenosine deaminase domain or an active fragment thereof,
[0603] a cytidine deaminase domain or an active fragment thereof, and
[0604] wherein B or B and D, each comprises one or more domains having nucleic acid sequence specific binding activity.

[0605] In some embodiments, the fusion protein comprises the following structure:
[0606] NH₂-[Aₙ-Bₒ-Cₙ]-COOH;
[0607] NH₂-[Aₙ-Bₒ-Cₙ-Dₒ]-COOH; or
[0608] NH₂-[Aₙ-Bₒ-Cₚ-Dₒ-E_{q}]-COOH;
   wherein A and C or A, C, and E, each comprises one or more of the following:
[0609] an adenosine deaminase domain or an active fragment thereof,
[0610] a cytidine deaminase domain or an active fragment thereof, and
[0611] wherein n is an integer: 1, 2, 3, 4, or 5, wherein p is an integer: 0, 1, 2, 3, 4, or 5; wherein q is an integer 0, 1, 2, 3, 4, or 5; and wherein B or B and D each comprises a domain having nucleic acid sequence specific binding activity; and wherein o is an integer: 1, 2, 3, 4, or 5.

[0612] For example, and without limitation, in some embodiments, the fusion protein comprises the structure:
[0613] NH2-[adenosine deaminase]-[Cas9 domain]-COOH;
[0614] NH2-[Cas9 domain]-[adenosine deaminase]-COOH;
[0615] NH2-[cytidine deaminase]-[Cas9 domain]-COOH;
[0616] NH2-[Cas9 domain]-[cytidine deaminase]-COOH;
[0617] NH2-[cytidine deaminase]-[Cas9 domain]-[adenosine deaminase]-COOH;
[0618] NH2-[adenosine deaminase]-[Cas9 domain]-[cytidine deaminase]-COOH;
[0619] NH2-[adenosine deaminase]-[cytidine deaminase]-[Cas9 domain]-COOH;
[0620] NH2-[cytidine deaminase]-[adenosine deaminase]-[Cas9 domain]-COOH;
[0621] NH2-[Cas9 domain]-[adenosine deaminase]-[cytidine deaminase]-COOH; or
[0622] NH2-[Cas9 domain]-[cytidine deaminase]-[adenosine deaminase]-COOH.

[0623] In some embodiments, any of the Cas12 domains or Cas12 proteins provided herein may be fused with any of the cytidine or adenosine deaminases provided herein. For example, and without limitation, in some embodiments, the fusion protein comprises the structure:
[0624] NH2-[adenosine deaminase]-[Cas12 domain]-COOH;
[0625] NH2-[Cas12 domain]-[adenosine deaminase]-COOH;
[0626] NH2-[cytidine deaminase]-[Cas12 domain]-COOH;
[0627] NH2-[Cas12 domain]-[cytidine deaminase]-COOH;
[0628] NH2-[cytidine deaminase]-[Cas12 domain]-[adenosine deaminase]-COOH;
[0629] NH2-[adenosine deaminase]-[Cas12 domain]-[cytidine deaminase]-COOH;
[0630] NH2-[adenosine deaminase]-[cytidine deaminase]-[Cas12 domain]-COOH;
[0631] NH2-[cytidine deaminase]-[adenosine deaminase]-[Cas12 domain]-COOH;
[0632] NH2-[Cas12 domain]-[adenosine deaminase]-[cytidine deaminase]-COOH; or
[0633] NH2-[Cas12 domain]-[cytidine deaminase]-[adenosine deaminase]-COOH.

[0634] In some embodiments, the adenosine deaminase is a TadA*8. Exemplary fusion protein structures include the following:
[0635] NH2-[TadA*8]-[Cas9 domain]-COOH;
[0636] NH2-[Cas9 domain]-[TadA*8]-COOH;
[0637] NH2-[TadA*8]-[Cas12 domain]-COOH; or
[0638] NH2-[Cas12 domain]-[TadA*8]-COOH.

[0639] In some embodiments, the adenosine deaminase of the fusion protein comprises a TadA*8 and a cytidine deaminase and/or an adenosine deaminase. In some embodiments, the TadA*8 is TadA*8.1, TadA*8.2, TadA*8.3, TadA*8.4, TadA*8.5, TadA*8.6, TadA*8.7, TadA*8.8, TadA*8.9, TadA*8.10, TadA*8.11, TadA*8.12, TadA*8.13, TadA*8.14, TadA*8.15, TadA*8.16, TadA*8.17, TadA*8.18, TadA*8.19, TadA*8.20, TadA*8.21, TadA*8.22, TadA*8.23, or TadA*8.24.

[0640] Exemplary fusion protein structures include the following:
[0641] NH2-[TadA*8]-[Cas9/Cas12]-[adenosine deaminase]-COOH;
[0642] NH2-[adenosine deaminase]-[Cas9/Cas12]-[TadA*8]-COOH;
[0643] NH2-[TadA*8]-[Cas9/Cas12]-[cytidine deaminase]-COOH; or
[0644] NH2-[cytidine deaminase]-[Cas9/Cas12]-[TadA*8]-COOH.

[0645] In some embodiments, the adenosine deaminase of the fusion protein comprises a TadA*9 and a cytidine deaminase and/or an adenosine deaminase. Exemplary fusion protein structures include the following:
[0646] NH2-[TadA*9]-[Cas9/Cas12]-[adenosine deaminase]-COOH;
[0647] NH2-[adenosine deaminase]-[Cas9/Cas12]-[TadA*9]-COOH;
[0648] NH2-[TadA*9]-[Cas9/Cas12]-[cytidine deaminase]-COOH; or
[0649] NH2-[cytidine deaminase]-[Cas9/Cas12]-[TadA*9]-COOH.

[0650] In some embodiments, the fusion protein can comprise a deaminase flanked by an N-terminal fragment and a C-terminal fragment of a Cas9 or Cas12 polypeptide. In some embodiments, the fusion protein comprises a cytidine deaminase flanked by an N-terminal fragment and a C-terminal fragment of a Cas9 or Cas12 polypeptide. In some embodiments, the fusion protein comprises an adenosine deaminase flanked by an N-terminal fragment and a C-terminal fragment of a Cas9 or Cas12 polypeptide.

[0651] In some embodiments, the fusion proteins comprising a cytidine deaminase or adenosine deaminase and a napDNAbp (e.g., Cas9 or Cas12 domain) do not include a linker sequence. In some embodiments, a linker is present between the cytidine or adenosine deaminase and the napDNAbp. In some embodiments, the “-” used in the general architecture above indicates the presence of an optional linker. In some embodiments, cytidine or adenosine deaminase and the napDNAbp are fused via any of the linkers provided herein. For example, in some embodiments the cytidine or adenosine deaminase and the napDNAbp are fused via any of the linkers provided herein.

[0652] It should be appreciated that the fusion proteins of the present disclosure may comprise one or more additional features. For example, in some embodiments, the fusion protein may comprise inhibitors, cytoplasmic localization sequences, export sequences, such as nuclear export sequences, or other localization sequences, as well as sequence tags that are useful for solubilization, purification, or detection of the fusion proteins. Suitable protein tags provided herein include, but are not limited to, biotin carboxylase carrier protein (BCCP) tags, myc-tags, calmodulin-tags, FLAG-tags, hemagglutinin (HA)-tags, polyhistidine tags, also referred to as histidine tags or His-tags, maltose binding protein (MBP)-tags, nus-tags, glutathione-S-transferase (GST)-tags, green fluorescent protein (GFP)-tags, thioredoxin-tags, S-tags, Softags (e.g., Softag 1, Softag 3), strep-tags, biotin ligase tags, FlAsH tags, V5 tags, and SBP-tags. Additional suitable sequences will be apparent to those of skill in the art. In some embodiments, the fusion protein comprises one or more His tags.

[0653] Exemplary, yet nonlimiting, fusion proteins are described in International PCT Application Nos. PCT/2017/044935, PCT/US2019/044935, and PCT/US2020/016288, each of which is incorporated herein by reference for its entirety.

### Fusion Proteins Comprising a Nuclear Localization Sequence (NLS)

[0654] In some embodiments, the fusion proteins provided herein further comprise one or more (e.g., 2, 3, 4, 5) nuclear targeting sequences, for example a nuclear localization sequence (NLS). In one embodiment, a bipartite NLS is used. In some embodiments, a NLS comprises an amino acid sequence that facilitates the importation of a protein, that comprises an NLS, into the cell nucleus (e.g., by nuclear transport). In some embodiments, any of the fusion proteins provided herein further comprise a nuclear localization sequence (NLS). In some embodiments, the NLS is fused to the N-terminus of the fusion protein. In some embodiments, the NLS is fused to the C-terminus of the fusion protein. In some embodiments, the NLS is fused to the N-terminus of the Cas9 domain. In some embodiments, the NLS is fused to the C-terminus of the Cas9 domain. In some embodiments, the NLS is fused to the C-terminus of an nCas9 domain or a dCas9 domain. In some embodiments, the NLS is fused to the N-terminus of the adenosine deaminase. In some embodiments, the NLS is fused to the C-terminus of the adenosine deaminase. In some embodiments, the NLS is fused to the fusion protein via one or more linkers. In some embodiments, the NLS is fused to the fusion protein without a linker. In some embodiments, the NLS comprises an amino acid sequence of any one of the NLS sequences provided or referenced herein. Additional nuclear localization sequences are known in the art and would be apparent to the skilled artisan. For example, NLS sequences are described in Plank et al., PCT/EP2000/011690, the contents of which are incorporated herein by reference for their disclosure of exemplary nuclear localization sequences. In some embodiments, an NLS comprises the amino acid sequence PKKKRKVEGADKRTADGSEFESPKKKRKV (SEQ ID NO: 328), KRTADGSEFESPKKKRKV (SEQ ID NO: 190), KRPAATKKAGQAKKKK (SEQ ID NO: 191), KKTELQTTNAENKTKKL (SEQ ID NO: 192), KRGINDRNFWRGENGRKTR (SEQ ID NO: 193), RKSGKIAAIVVKRPRKPKKKRKV (SEQ ID NO: 329), or MDSLLMNRRKFLYQFKNVRWAKGRRETYLC (SEQ ID NO: 196).

[0655] In some embodiments, the fusion proteins comprising an adenosine deaminase, a Cas9 domain, and an NLS do not comprise a linker sequence. In some embodiments, linker sequences between one or more of the domains or proteins (e.g., adenosine deaminase, Cas9 domain or NLS) are present. In some embodiments, a linker is present between the adenosine deaminase domains and the napDNAbp. In some embodiments, the “-” used in the general architecture below indicates the presence of an optional linker. In some embodiments, the adenosine deaminase and the napDNAbp are fused via any of the linkers provided herein. For example, in some embodiments the adenosine deaminase and the napDNAbp are fused via any of the linkers provided herein.

[0656] In some embodiments, the general architecture of exemplary napDNAbp (e.g., Cas9) fusion proteins with an adenosine deaminase and a napDNAbp (e.g., Cas9) domain comprises any one of the following structures, where NLS is a nuclear localization sequence (e.g., any NLS provided herein), NH₂ is the N-terminus of the fusion protein, and COOH is the C-terminus of the fusion protein:
[0657] NH₂′-NLS-[adenosine deaminase]-[napDNAbp domain]-COOH;
[0658] NH₂′-NLS [napDNAbp domain]-[adenosine deaminase]-COOH;
[0659] NH₂-[adenosine deaminase]-[napDNAbp domain]-NLS-COOH;
[0660] NH₂-[napDNAbp domain]-[adenosine deaminase]-NLS-COOH;

[0661] In some embodiments, the NLS is present in a linker or the NLS is flanked by linkers, for example described herein. A bipartite NLS comprises two basic amino acid clusters, which are separated by a relatively short spacer sequence (hence bipartite—2 parts, while monopartite NLSs are not). The NLS of nucleoplasmin, KR [PAATKKAGQA] KKKK (SEQ ID NO: 191), is the prototype of the ubiquitous bipartite signal: two clusters of basic amino acids, separated by a spacer of about 10 amino acids. The sequence of an exemplary bipartite NLS follows: PKKKRKVEGADKRTADGSEFESPKKKRKV (SEQ ID NO: 328).

[0662] A vector that encodes a CRISPR enzyme comprising one or more nuclear localization sequences (NLSs) can be used. For example, there can be or be about 1, 2, 3, 4, 5, 6, 7, 8, 9, 10 NLSs used. A CRISPR enzyme can comprise the NLSs at or near the amino-terminus, about or more than about 1, 2, 3, 4, 5, 6, 7, 8, 9, 10 NLSs at or near the carboxy-terminus, or any combination thereof (e.g., one or more NLS at the amino-terminus and one or more NLS at the carboxy terminus). When more than one NLS is present, each can be selected independently of others, such that a single NLS can be present in more than one copy and/or in combination with one or more other NLSs present in one or more copies.

[0663] CRISPR enzymes used in the methods can comprise about 6 NLSs. An NLS is considered near the N- or C-terminus when the nearest amino acid to the NLS is within about 50 amino acids along a polypeptide chain from the N- or C-terminus, e.g., within 1, 2, 3, 4, 5, 10, 15, 20, 25, 30, 40, or 50 amino acids.

### Base Editor System

[0664] Provided herein are systems, compositions, and methods for editing a nucleobase using a base editor system. In some embodiments, the base editor system comprises (1) a base editor (BE) comprising a polynucleotide programmable nucleotide binding domain and a nucleobase editing domain (e.g., a deaminase domain) for editing the nucleobase; and (2) a guide polynucleotide (e.g., guide RNA) in conjunction with the polynucleotide programmable nucleotide binding domain. In some embodiments, the base editor system is an adenosine base editor (ABE). In some embodiments, the polynucleotide programmable nucleotide binding domain is a polynucleotide programmable DNA binding domain. In some embodiments, the polynucleotide programmable nucleotide binding domain is a polynucleotide programmable RNA binding domain. In some embodiments, the nucleobase editing domain is a deaminase domain. In some embodiments, a deaminase domain can be an adenine deaminase or an adenosine deaminase. In some embodiments, the adenosine base editor can deaminate adenine in DNA.

[0665] In some embodiments, a base editing system as provided herein provides a new approach to genome editing that uses a fusion protein containing a catalytically defective Streptococcus pyogenes Cas9, a deaminase (e.g., adenosine deaminase), and an inhibitor of base excision repair to induce programmable, single nucleotide (C→T or A→G) changes in DNA without generating double-strand DNA breaks, without requiring a donor DNA template, and without inducing an excess of stochastic insertions and deletions.

[0666] Details of nucleobase editing proteins are described in International PCT Application Nos. PCT/2017/045381 (WO2018/027078) and PCT/US2016/058344 (WO2017/070632), each of which is incorporated herein by reference for its entirety. Also see Komor, A. C., et al., “Programmable editing of a target base in genomic DNA without double-stranded DNA cleavage” Nature 533, 420-424 (2016); Gaudelli, N. M., et al., “Programmable base editing of A·T to G·C in genomic DNA without DNA cleavage” Nature 551, 464-471 (2017); and Komor, A. C., et al., “Improved base excision repair inhibition and bacteriophage Mu Gam protein yields C:G-to-T:A base editors with higher efficiency and product purity” Science Advances 3:eaao4774 (2017), the entire contents of which are hereby incorporated by reference.

[0667] Use of the base editor system provided herein comprises the steps of: (a) contacting a target nucleotide sequence of a polynucleotide (e.g., double- or single stranded DNA or RNA) of a subject with a base editor system comprising a nucleobase editor (e.g., an adenosine base editor) and a guide polynucleic acid (e.g., gRNA), wherein the target nucleotide sequence comprises a targeted nucleobase pair; (b) inducing strand separation of said target region; (c) converting a first nucleobase of said target nucleobase pair in a single strand of the target region to a second nucleobase; and (d) cutting no more than one strand of said target region, where a third nucleobase complementary to the first nucleobase base is replaced by a fourth nucleobase complementary to the second nucleobase. It should be appreciated that in some embodiments, step (b) is omitted. In some embodiments, said targeted nucleobase pair is a plurality of nucleobase pairs in one or more genes. In some embodiments, the base editor system provided herein is capable of multiplex editing of a plurality of nucleobase pairs in one or more genes. In some embodiments, the plurality of nucleobase pairs is located in the same gene. In some embodiments, the plurality of nucleobase pairs is located in one or more genes, wherein at least one gene is located in a different locus.

[0668] In some embodiments, the cut single strand (nicked strand) is hybridized to the guide nucleic acid. In some embodiments, the cut single strand is opposite to the strand comprising the first nucleobase. In some embodiments, the base editor comprises a Cas9 domain. In some embodiments, the first base is adenine, and the second base is not a G, C, A, or T. In some embodiments, the second base is inosine.

[0669] In some embodiments, a single guide polynucleotide may be utilized to target a deaminase to a target nucleic acid sequence. In some embodiments, a single pair of guide polynucleotides may be utilized to target different deaminases to a target nucleic acid sequence.

[0670] The nucleobase components and the polynucleotide programmable nucleotide binding component of a base editor system may be associated with each other covalently or non-covalently. For example, in some embodiments, the deaminase domain can be targeted to a target nucleotide sequence by a polynucleotide programmable nucleotide binding domain. In some embodiments, the polynucleotide programmable nucleotide binding domain is non-covalently associated with or attached to the deaminase domain. In some embodiments, a polynucleotide programmable nucleotide binding domain can be fused or linked to a deaminase domain. In some embodiments, a polynucleotide programmable nucleotide binding domain can target a deaminase domain to a target nucleotide sequence by non-covalently interacting with or associating with the deaminase domain. For example, in some embodiments, the nucleobase editing component, e.g., the deaminase component can comprise an additional heterologous portion or domain that is capable of interacting with, associating with, or capable of forming a complex with an additional heterologous portion or domain that is part of a polynucleotide programmable nucleotide binding domain. In some embodiments, the additional heterologous portion may be capable of binding to, interacting with, associating with, or forming a complex with a polypeptide. In some embodiments, the additional heterologous portion may be capable of binding to, interacting with, associating with, or forming a complex with a polynucleotide. In some embodiments, the additional heterologous portion may be capable of binding to a guide polynucleotide. In some embodiments, the additional heterologous portion may be capable of binding to a polypeptide linker. In some embodiments, the additional heterologous portion may be capable of binding to a polynucleotide linker. The additional heterologous portion may be a protein domain. In some embodiments, the additional heterologous portion may be a K Homology (KH) domain, a MS2 coat protein domain, a PP7 coat protein domain, a SfMu Com coat protein domain, a steril alpha motif, a telomerase Ku binding motif and Ku protein, a telomerase Sm7 binding motif and Sm7 protein, or an RNA recognition motif.

[0671] A base editor system may further comprise a guide polynucleotide component. It should be appreciated that components of the base editor system may be associated with each other via covalent bonds, noncovalent interactions, or any combination of associations and interactions thereof. In some embodiments, a deaminase domain can be targeted to a target nucleotide sequence by a guide polynucleotide. For example, in some embodiments, the nucleobase editing component of the base editor system, e.g., the deaminase component, can comprise an additional heterologous portion or domain (e.g., polynucleotide binding domain such as an RNA or DNA binding protein) that is capable of interacting with, associating with, or capable of forming a complex with a portion or segment (e.g., a polynucleotide motif) of a guide polynucleotide. In some embodiments, the additional heterologous portion or domain (e.g., polynucleotide binding domain such as an RNA or DNA binding protein) can be fused or linked to the deaminase domain. In some embodiments, the additional heterologous portion may be capable of binding to, interacting with, associating with, or forming a complex with a polypeptide. In some embodiments, the additional heterologous portion may be capable of binding to, interacting with, associating with, or forming a complex with a polynucleotide. In some embodiments, the additional heterologous portion may be capable of binding to a guide polynucleotide. In some embodiments, the additional heterologous portion may be capable of binding to a polypeptide linker. In some embodiments, the additional heterologous portion may be capable of binding to a polynucleotide linker. The additional heterologous portion may be a protein domain. In some embodiments, the additional heterologous portion may be a K Homology (KH) domain, a MS2 coat protein domain, a PP7 coat protein domain, a SfMu Com coat protein domain, a sterile alpha motif, a telomerase Ku binding motif and Ku protein, a telomerase Sm7 binding motif and Sm7 protein, or an RNA recognition motif.

[0672] In some embodiments, a base editor system can further comprise an inhibitor of base excision repair (BER) component. It should be appreciated that components of the base editor system may be associated with each other via covalent bonds, noncovalent interactions, or any combination of associations and interactions thereof. The inhibitor of BER component may comprise a base excision repair inhibitor. In some embodiments, the inhibitor of base excision repair can be a uracil DNA glycosylase inhibitor (UGI). In some embodiments, the inhibitor of base excision repair can be an inosine base excision repair inhibitor. In some embodiments, the inhibitor of base excision repair can be targeted to the target nucleotide sequence by the polynucleotide programmable nucleotide binding domain. In some embodiments, a polynucleotide programmable nucleotide binding domain can be fused or linked to an inhibitor of base excision repair. In some embodiments, a polynucleotide programmable nucleotide binding domain can be fused or linked to a deaminase domain and an inhibitor of base excision repair. In some embodiments, a polynucleotide programmable nucleotide binding domain can target an inhibitor of base excision repair to a target nucleotide sequence by non-covalently interacting with or associating with the inhibitor of base excision repair. For example, in some embodiments, the inhibitor of base excision repair component can comprise an additional heterologous portion or domain that is capable of interacting with, associating with, or capable of forming a complex with an additional heterologous portion or domain that is part of a polynucleotide programmable nucleotide binding domain. In some embodiments, the inhibitor of base excision repair can be targeted to the target nucleotide sequence by the guide polynucleotide. For example, in some embodiments, the inhibitor of base excision repair can comprise an additional heterologous portion or domain (e.g., polynucleotide binding domain such as an RNA or DNA binding protein) that is capable of interacting with, associating with, or capable of forming a complex with a portion or segment (e.g., a polynucleotide motif) of a guide polynucleotide. In some embodiments, the additional heterologous portion or domain of the guide polynucleotide (e.g., polynucleotide binding domain such as an RNA or DNA binding protein) can be fused or linked to the inhibitor of base excision repair. In some embodiments, the additional heterologous portion may be capable of binding to, interacting with, associating with, or forming a complex with a polynucleotide. In some embodiments, the additional heterologous portion may be capable of binding to a guide polynucleotide. In some embodiments, the additional heterologous portion may be capable of binding to a polypeptide linker. In some embodiments, the additional heterologous portion may be capable of binding to a polynucleotide linker. The additional heterologous portion may be a protein domain. In some embodiments, the additional heterologous portion may be a K Homology (KH) domain, a MS2 coat protein domain, a PP7 coat protein domain, a SfMu Com coat protein domain, a sterile alpha motif, a telomerase Ku binding motif and Ku protein, a telomerase Sm7 binding motif and Sm7 protein, or an RNA recognition motif.

[0673] In some embodiments, the base editor inhibits base excision repair (BER) of the edited strand. In some embodiments, the base editor protects or binds the non-edited strand. In some embodiments, the base editor comprises UGI activity. In some embodiments, the base editor comprises a catalytically inactive inosine-specific nuclease. In some embodiments, the base editor comprises nickase activity. In some embodiments, the intended edit of base pair is upstream of a PAM site. In some embodiments, the intended edit of base pair is 1, 2, 3, 4, 5, 6, 7, 8, 9, 10, 11, 12, 13, 14, 15, 16, 17, 18, 19, or 20 nucleotides upstream of the PAM site. In some embodiments, the intended edit of base-pair is downstream of a PAM site. In some embodiments, the intended edited base pair is 1, 2, 3, 4, 5, 6, 7, 8, 9, 10, 11, 12, 13, 14, 15, 16, 17, 18, 19, or 20 nucleotides downstream stream of the PAM site.

[0674] In some embodiments, the method does not require a canonical (e.g., NGG) PAM site. In some embodiments, the nucleobase editor comprises a linker or a spacer. In some embodiments, the linker or spacer is 1-25 amino acids in length. In some embodiments, the linker or spacer is 5-20 amino acids in length. In some embodiments, the linker or spacer is 10, 11, 12, 13, 14, 15, 16, 17, 18, 19, or 20 amino acids in length.

[0675] In some embodiments, the base editing fusion proteins provided herein need to be positioned at a precise location, for example, where a target base is placed within a defined region (e.g., a “deamination window”). In some embodiments, a target can be within a 4 base region. In some embodiments, such a defined target region can be approximately 15 bases upstream of the PAM. See Komor, A. C., et al., “Programmable editing of a target base in genomic DNA without double-stranded DNA cleavage” Nature 533, 420-424 (2016); Gaudelli, N. M., et al., “Programmable base editing of A·T to G·C in genomic DNA without DNA cleavage” Nature 551, 464-471 (2017); and Komor, A. C., et al., “Improved base excision repair inhibition and bacteriophage Mu Gam protein yields C:G-to-T:A base editors with higher efficiency and product purity” Science Advances 3:eaao4774 (2017), the entire contents of which are hereby incorporated by reference.

[0676] In some embodiments, the target region comprises a target window, wherein the target window comprises the target nucleobase pair. In some embodiments, the target window comprises 1-10 nucleotides. In some embodiments, the target window is 1, 2, 3, 4, 5, 6, 7, 8, 9, 10, 11, 12, 13, 14, 15, 16, 17, 18, 19, or 20 nucleotides in length. In some embodiments, the intended edit of base pair is within the target window. In some embodiments, the target window comprises the intended edit of base pair. In some embodiments, the method is performed using any of the base editors provided herein. In some embodiments, a target window is a deamination window. A deamination window can be the defined region in which a base editor acts upon and deaminates a target nucleotide. In some embodiments, the deamination window is within a 2, 3, 4, 5, 6, 7, 8, 9, or 10 base regions. In some embodiments, the deamination window is 5, 6, 7, 8, 9, 10, 11, 12, 13, 14, 15, 16, 17, 18, 19, 20, 21, 22, 23, 24, or 25 bases upstream of the PAM.

[0677] The base editors of the present disclosure can comprise any domain, feature or amino acid sequence which facilitates the editing of a target polynucleotide sequence. For example, in some embodiments, the base editor comprises a nuclear localization sequence (NLS). In some embodiments, an NLS of the base editor is localized between a deaminase domain and a polynucleotide programmable nucleotide binding domain. In some embodiments, an NLS of the base editor is localized C-terminal to a polynucleotide programmable nucleotide binding domain.

[0678] Other exemplary features that can be present in a base editor as disclosed herein are localization sequences, such as cytoplasmic localization sequences, export sequences, such as nuclear export sequences, or other localization sequences, as well as sequence tags that are useful for solubilization, purification, or detection of the fusion proteins. Suitable protein tags provided herein include, but are not limited to, biotin carboxylase carrier protein (BCCP) tags, myc-tags, calmodulin-tags, FLAG-tags, hemagglutinin (HA)-tags, polyhistidine tags, also referred to as histidine tags or His-tags, maltose binding protein (MBP)-tags, nus-tags, glutathione-S-transferase (GST)-tags, green fluorescent protein (GFP)-tags, thioredoxin-tags, S-tags, Softags (e.g., Softag 1, Softag 3), strep-tags, biotin ligase tags, FlAsH tags, V5 tags, and SBP-tags. Additional suitable sequences will be apparent to those of skill in the art. In some embodiments, the fusion protein comprises one or more His tags.

[0679] In some embodiments, the adenosine base editor (ABE) can deaminate adenine in DNA. In some embodiments, ABE is generated by replacing APOBEC1 component of BE3 with natural or engineered E. coli TadA, human ADAR2, mouse ADA, or human ADAT2. In some embodiments, ABE comprises evolved TadA variant. In some embodiments, the ABE is ABE 1.2 (TadA*-XTEN-nCas9-NLS). In some embodiments, TadA* comprises A106V and D108N mutations.

[0680] In some embodiments, the ABE is a second-generation ABE. In some embodiments, the ABE is ABE2.1, which comprises additional mutations D147Y and E155V in TadA* (TadA*2.1). In some embodiments, the ABE is ABE2.2, ABE2.1 fused to catalytically inactivated version of human alkyl adenine DNA glycosylase (AAG with E125Q mutation). In some embodiments, the ABE is ABE2.3, ABE2.1 fused to catalytically inactivated version of E. coli Endo V (inactivated with D35A mutation). In some embodiments, the ABE is ABE2.6 which has a linker twice as long (32 amino acids, (SGGS)2 (SEQ ID NO: 330)-XTEN-(SGGS)2 (SEQ ID NO: 330)) as the linker in ABE2.1. In some embodiments, the ABE is ABE2.7, which is ABE2.1 tethered with an additional wild-type TadA monomer. In some embodiments, the ABE is ABE2.8, which is ABE2.1 tethered with an additional TadA*2.1 monomer. In some embodiments, the ABE is ABE2.9, which is a direct fusion of evolved TadA (TadA*2.1) to the N-terminus of ABE2.1. In some embodiments, the ABE is ABE2.10, which is a direct fusion of wild-type TadA to the N-terminus of ABE2.1. In some embodiments, the ABE is ABE2.11, which is ABE2.9 with an inactivating E59A mutation at the N-terminus of TadA* monomer. In some embodiments, the ABE is ABE2.12, which is ABE2.9 with an inactivating E59A mutation in the internal TadA* monomer.

[0681] In some embodiments, the ABE is a fifth generation ABE. In some embodiments, the ABE is ABE5.1, which is generated by importing a consensus set of mutations from surviving clones (H36L, R51L, S146C, and K157N) into ABE3.1. In some embodiments, the ABE is ABE5.3, which has a heterodimeric construct containing wild-type E. coli TadA fused to an internal evolved TadA*. In some embodiments, the ABE is ABE5.2, ABE5.4, ABE5.5, ABE5.6, ABE5.7, ABE5.8, ABE5.9, ABE5.10, ABE5.11, ABE5.12, ABE5.13, or ABE5.14, as shown in Table 9 below. In some embodiments, the ABE is a sixth generation ABE. In some embodiments, the ABE is ABE6.1, ABE6.2, ABE6.3, ABE6.4, ABE6.5, or ABE6.6, as shown in Table 9 below. In some embodiments, the ABE is a seventh generation ABE. In some embodiments, the ABE is ABE7.1, ABE7.2, ABE7.3, ABE7.4, ABE7.5, ABE7.6, ABE7.7, ABE7.8, ABE 7.9, or ABE7.10, as shown in Table 9 below.

[0682] In some embodiments, the adenosine base editor (ABE) can deaminate adenine in DNA. In some embodiments, the ABE is a an ABE as shown in Table 9 below.

TABLE 9
Genotypes of ABEs

| | 23 | 26 | 36 | 37 | 48 | 49 | 51 | 72 | 84 | 87 | 106 | 108 | 123 | 125 | 142 | 146 | 147 | 152 | 155 | 156 | 157 | 161 |
|---|---|---|---|---|---|---|---|---|---|---|---|---|---|---|---|---|---|---|---|---|---|---|
| ABE0.1 | W | R | H | N | P | | R | N | L | S | A | D | H | G | A | S | D | R | E | I | K | K |
| ABE0.2 | W | R | H | N | P | | R | N | L | S | A | D | H | G | A | S | D | R | E | I | K | K |
| ABE1.1 | W | R | H | N | P | | R | N | L | S | A | N | H | G | A | S | D | R | E | I | K | K |
| ABE1.2 | W | R | H | N | P | | R | N | L | S | V | N | H | G | A | S | D | R | E | I | K | K |
| ABE2.1 | W | R | H | N | P | | R | N | L | S | V | N | H | G | A | S | Y | R | V | I | K | K |
| ABE2.2 | W | R | H | N | P | | R | N | L | S | V | N | H | G | A | S | Y | R | V | I | K | K |
| ABE2.3 | W | R | H | N | P | | R | N | L | S | V | N | H | G | A | S | Y | R | V | I | K | K |
| ABE2.4 | W | R | H | N | P | | R | N | L | S | V | N | H | G | A | S | Y | R | V | I | K | K |
| ABE2.5 | W | R | H | N | P | | R | N | L | S | V | N | H | G | A | S | Y | R | V | I | K | K |
| ABE2.6 | W | R | H | N | P | | R | N | L | S | V | N | H | G | A | S | Y | R | V | I | K | K |
| ABE2.7 | W | R | H | N | P | | R | N | L | S | V | N | H | G | A | S | Y | R | V | I | K | K |
| ABE2.8 | W | R | H | N | P | | R | N | L | S | V | N | H | G | A | S | Y | R | V | I | K | K |
| ABE2.9 | W | R | H | N | P | | R | N | L | S | V | N | H | G | A | S | Y | R | V | I | K | K |
| ABE2.10 | W | R | H | N | P | | R | N | L | S | V | N | H | G | A | S | Y | R | V | I | K | K |
| ABE2.11 | W | R | H | N | P | | R | N | L | S | V | N | H | G | A | S | Y | R | V | I | K | K |
| ABE2.12 | W | R | H | N | P | | R | N | L | S | V | N | H | G | A | S | Y | R | V | I | K | K |
| ABE3.1 | W | R | H | N | P | | R | N | F | S | V | N | Y | G | A | S | Y | R | V | F | K | K |
| ABE3.2 | W | R | H | N | P | | R | N | F | S | V | N | Y | G | A | S | Y | R | V | F | K | K |
| ABE3.3 | W | R | H | N | P | | R | N | F | S | V | N | Y | G | A | S | Y | R | V | F | K | K |
| ABE3.4 | W | R | H | N | P | | R | N | F | S | V | N | Y | G | A | S | Y | R | V | F | K | K |
| ABE3.5 | W | R | H | N | P | | R | N | F | S | V | N | Y | G | A | S | Y | R | V | F | K | K |
| ABE3.6 | W | R | H | N | P | | R | N | F | S | V | N | Y | G | A | S | Y | R | V | F | K | K |
| ABE3.7 | W | R | H | N | P | | R | N | F | S | V | N | Y | G | A | S | Y | R | V | F | K | K |
| ABE3.8 | W | R | H | N | P | | R | N | F | S | V | N | Y | G | A | S | Y | R | V | F | K | K |
| ABE4.1 | W | R | H | N | P | | R | N | L | S | V | N | H | G | N | S | Y | R | V | I | K | K |
| ABE4.2 | W | G | H | N | P | | R | N | L | S | V | N | H | G | N | S | Y | R | V | I | K | K |
| ABE4.3 | W | R | H | N | P | | R | N | F | S | V | N | Y | G | N | S | Y | R | V | F | K | K |
| ABE5.1 | W | R | L | N | P | | L | N | F | S | V | N | Y | G | A | C | Y | R | V | F | N | K |
| ABE5.2 | W | R | H | S | P | | R | N | F | S | V | N | Y | G | A | S | Y | R | V | F | K | T |
| ABE5.3 | W | R | L | N | P | | L | N | I | S | V | N | Y | G | A | C | Y | R | V | F | N | K |
| ABE5.4 | W | R | H | S | P | | R | N | F | S | V | N | Y | G | A | S | Y | R | V | F | K | T |
| ABE5.5 | W | R | L | N | P | | L | N | F | S | V | N | Y | G | A | C | Y | R | V | F | N | K |
| ABE5.6 | W | R | L | N | P | | L | N | F | S | V | N | Y | G | A | C | Y | R | V | F | N | K |
| ABE5.7 | W | R | L | N | P | | L | N | F | S | V | N | Y | G | A | C | Y | R | V | F | N | K |
| ABE5.8 | W | R | L | N | P | | L | N | F | S | V | N | Y | G | A | C | Y | R | V | F | N | K |
| ABE5.9 | W | R | L | N | P | | L | N | F | S | V | N | Y | G | A | C | Y | R | V | F | N | K |
| ABE5.10 | W | R | L | N | P | | L | N | F | S | V | N | Y | G | A | C | Y | R | V | F | N | K |
| ABE5.11 | W | R | L | N | P | | L | N | F | S | V | N | Y | G | A | C | Y | R | V | F | N | K |
| ABE5.12 | W | R | L | N | P | | L | N | F | S | V | N | Y | G | A | C | Y | R | V | F | N | K |
| ABE5.13 | W | R | H | N | P | | L | D | F | S | V | N | Y | A | A | S | Y | R | V | F | K | K |
| ABE5.14 | W | R | H | N | S | | L | N | F | C | V | N | Y | G | A | S | Y | R | V | F | K | K |
| ABE6.1 | W | R | H | N | S | | L | N | F | S | V | N | Y | G | N | S | Y | R | V | F | K | K |
| ABE6.2 | W | R | H | N | T | V | L | N | F | S | V | N | Y | G | N | S | Y | R | V | F | N | K |
| ABE6.3 | W | R | L | N | S | | L | N | F | S | V | N | Y | G | A | C | Y | R | V | F | N | K |
| ABE6.4 | W | R | L | N | S | | L | N | F | S | V | N | Y | G | N | C | Y | R | V | F | N | K |
| ABE6.5 | W | R | L | N | T | V | L | N | F | S | V | N | Y | G | A | C | Y | R | V | F | N | K |
| ABE6.6 | W | R | L | N | T | V | L | N | F | S | V | N | Y | G | N | C | Y | R | V | F | N | K |
| ABE7.1 | W | R | L | N | A | | L | N | F | S | V | N | Y | G | A | C | Y | R | V | F | N | K |
| ABE7.2 | W | R | L | N | A | | L | N | F | S | V | N | Y | G | N | C | Y | R | V | F | N | K |
| ABE7.3 | L | R | L | N | A | | L | N | F | S | V | N | Y | G | A | C | Y | R | V | F | N | K |
| ABE7.4 | R | R | L | N | A | | L | N | F | S | V | N | Y | G | A | C | Y | R | V | F | N | K |
| ABE7.5 | W | R | L | N | A | | L | N | F | S | V | N | Y | G | A | C | Y | H | V | F | N | K |
| ABE7.6 | W | R | L | N | A | | L | N | I | S | V | N | Y | G | A | C | Y | P | V | F | N | K |
| ABE7.7 | L | R | I | N | A | | L | N | F | S | V | N | Y | G | A | C | Y | P | V | I | N | K |
| ABE7.8 | L | R | L | N | A | | L | N | F | S | V | N | Y | G | N | C | Y | R | V | F | N | K |
| ABE7.9 | L | R | L | N | A | | L | N | F | S | V | N | Y | G | N | C | Y | P | V | F | N | K |
| ABE7.10 | R | R | L | N | A | | L | N | F | S | V | N | Y | G | A | C | Y | P | V | F | N | K |

[0683] In some embodiments, the base editor is an eighth generation ABE (ABE8). In some embodiments, the ABE8 contains a TadA*8 variant. In some embodiments, the ABE8 has a monomeric construct containing a TadA*8 variant (“ABE8.x-m”). In some embodiments, the ABE8 is ABE8.1-m, which has a monomeric construct containing TadA*7.10 with a Y147T mutation (TadA*8.1). In some embodiments, the ABE8 is ABE8.2-m, which has a monomeric construct containing TadA*7.10 with a Y147R mutation (TadA*8.2). In some embodiments, the ABE8 is ABE8.3-m, which has a monomeric construct containing TadA*7.10 with a Q154S mutation (TadA*8.3).

[0684] In some embodiments, the ABE8 is ABE8.4-m, which has a monomeric construct containing TadA*7.10 with a Y123H mutation (TadA*8.4). In some embodiments, the ABE8 is ABE8.5-m, which has a monomeric construct containing TadA*7.10 with a V82S mutation (TadA*8.5). In some embodiments, the ABE8 is ABE8.6-m, which has a monomeric construct containing TadA*7.10 with a T166R mutation (TadA*8.6). In some embodiments, the ABE8 is ABE8.7-m, which has a monomeric construct containing TadA*7.10 with a Q154R mutation (TadA*8.7). In some embodiments, the ABE8 is ABE8.8-m, which has a monomeric construct containing TadA*7.10 with Y147R, Q154R, and Y123H mutations (TadA*8.8). In some embodiments, the ABE8 is ABE8.9-m, which has a monomeric construct containing TadA*7.10 with Y147R, Q154R and I76Y mutations (TadA*8.9). In some embodiments, the ABE8 is ABE8.10-m, which has a monomeric construct containing TadA*7.10 with Y147R, Q154R, and T166R mutations (TadA*8.10). In some embodiments, the ABE8 is ABE8.11-m, which has a monomeric construct containing TadA*7.10 with Y147T and Q154R mutations (TadA*8.11). In some embodiments, the ABE8 is ABE8.12-m, which has a monomeric construct containing TadA*7.10 with Y147T and Q154S mutations (TadA*8.12).

[0685] In some embodiments, the ABE8 is ABE8.13-m, which has a monomeric construct containing TadA*7.10 with Y123H (Y123H reverted from H123Y), Y147R, Q154R and I76Y mutations (TadA*8.13). In some embodiments, the ABE8 is ABE8.14-m, which has a monomeric construct containing TadA*7.10 with I76Y and V82S mutations (TadA*8.14). In some embodiments, the ABE8 is ABE8.15-m, which has a monomeric construct containing TadA*7.10 with V82S and Y147R mutations (TadA*8.15). In some embodiments, the ABE8 is ABE8.16-m, which has a monomeric construct containing TadA*7.10 with V82S, Y123H (Y123H reverted from H123Y) and Y147R mutations (TadA*8.16). In some embodiments, the ABE8 is ABE8.17-m, which has a monomeric construct containing TadA*7.10 with V82S and Q154R mutations (TadA*8.17). In some embodiments, the ABE8 is ABE8.18-m, which has a monomeric construct containing TadA*7.10 with V82S, Y123H (Y123H reverted from H123Y) and Q154R mutations (TadA*8.18). In some embodiments, the ABE8 is ABE8.19-m, which has a monomeric construct containing TadA*7.10 with V82S, Y123H (Y123H reverted from H123Y), Y147R and Q154R mutations (TadA*8.19). In some embodiments, the ABE8 is ABE8.20-m, which has a monomeric construct containing TadA*7.10 with I76Y, V82S, Y123H (Y123H reverted from H123Y), Y147R and Q154R mutations (TadA*8.20). In some embodiments, the ABE8 is ABE8.21-m, which has a monomeric construct containing TadA*7.10 with Y147R and Q154S mutations (TadA*8.21). In some embodiments, the ABE8 is ABE8.22-m, which has a monomeric construct containing TadA*7.10 with V82S and Q154S mutations (TadA*8.22). In some embodiments, the ABE8 is ABE8.23-m, which has a monomeric construct containing TadA*7.10 with V82S and Y123H (Y123H reverted from H123Y) mutations (TadA*8.23). In some embodiments, the ABE8 is ABE8.24-m, which has a monomeric construct containing TadA*7.10 with V82S, Y123H (Y123H reverted from H123Y), and Y147T mutations (TadA*8.24).

[0686] In some embodiments, the ABE8 has a heterodimeric construct containing wild-type E. coli TadA fused to a TadA*8 variant (“ABE8.x-d”). In some embodiments, the ABE8 is ABE8.1-d, which has a heterodimeric construct containing wild-type E. coli TadA fused to TadA*7.10 with a Y147T mutation (TadA*8.1). In some embodiments, the ABE8 is ABE8.2-d, which has a heterodimeric construct containing wild-type E. coli TadA fused to TadA*7.10 with a Y147R mutation (TadA*8.2). In some embodiments, the ABE8 is ABE8.3-d, which has a heterodimeric construct containing wild-type E. coli TadA fused to TadA*7.10 with a Q154S mutation (TadA*8.3). In some embodiments, the ABE8 is ABE8.4-d, which has a heterodimeric construct containing wild-type E. coli TadA fused to TadA*7.10 with a Y123H mutation (TadA*8.4). In some embodiments, the ABE8 is ABE8.5-d, which has a heterodimeric construct containing wild-type E. coli TadA fused to TadA*7.10 with a V82S mutation (TadA*8.5). In some embodiments, the ABE8 is ABE8.6-d, which has a heterodimeric construct containing wild-type E. coli TadA fused to TadA*7.10 with a T166R mutation (TadA*8.6). In some embodiments, the ABE8 is ABE8.7-d, which has a heterodimeric construct containing wild-type E. coli TadA fused to TadA*7.10 with a Q154R mutation (TadA*8.7). In some embodiments, the ABE8 is ABE8.8-d, which has a heterodimeric construct containing wild-type E. coli TadA fused to TadA*7.10 with Y147R, Q154R, and Y123H mutations (TadA*8.8). In some embodiments, the ABE8 is ABE8.9-d, which has a heterodimeric construct containing wild-type E. coli TadA fused to TadA*7.10 with Y147R, Q154R and I76Y mutations (TadA*8.9). In some embodiments, the ABE8 is ABE8.10-d, which has a heterodimeric construct containing wild-type E. coli TadA fused to TadA*7.10 with Y147R, Q154R, and T166R mutations (TadA*8.10). In some embodiments, the ABE8 is ABE8.11-d, which has a heterodimeric construct containing wild-type E. coli TadA fused to TadA*7.10 with Y147T and Q154R mutations (TadA*8.11). In some embodiments, the ABE8 is ABE8.12-d, which has heterodimeric construct containing wild-type E. coli TadA fused to TadA*7.10 with Y147T and Q154S mutations (TadA*8.12). In some embodiments, the ABE8 is ABE8.13-d, which has a heterodimeric construct containing wild-type E. coli TadA fused to TadA*7.10 with Y123H (Y123H reverted from H123Y), Y147R, Q154R and I76Y mutations (TadA*8.13). In some embodiments, the ABE8 is ABE8.14-d, which has a heterodimeric construct containing wild-type E. coli TadA fused to TadA*7.10 with I76Y and V82S mutations (TadA*8.14). In some embodiments, the ABE8 is ABE8.15-d, which has a heterodimeric construct containing wild-type E. coli TadA fused to TadA*7.10 with V82S and Y147R mutations (TadA*8.15). In some embodiments, the ABE8 is ABE8.16-d, which has a heterodimeric construct containing wild-type E. coli TadA fused to TadA*7.10 with V82S, Y123H (Y123H reverted from H123Y) and Y147R mutations (TadA*8.16). In some embodiments, the ABE8 is ABE8.17-d, which has a heterodimeric construct containing wild-type E. coli TadA fused to TadA*7.10 with V82S and Q154R mutations (TadA*8.17). In some embodiments, the ABE8 is ABE8.18-d, which has a heterodimeric construct containing wild-type E. coli TadA fused to TadA*7.10 with V82S, Y123H (Y123H reverted from H123Y) and Q154R mutations (TadA*8.18). In some embodiments, the ABE8 is ABE8.19-d, which has a heterodimeric construct containing wild-type E. coli TadA fused to TadA*7.10 with V82S, Y123H (Y123H reverted from H123Y), Y147R and Q154R mutations (TadA*8.19). In some embodiments, the ABE8 is ABE8.20-d, which has a heterodimeric construct containing wild-type E. coli TadA fused to TadA*7.10 with I76Y, V82S, Y123H (Y123H reverted from H123Y), Y147R and Q154R mutations (TadA*8.20). In some embodiments, the ABE8 is ABE8.21-d, which has a heterodimeric construct containing wild-type E. coli TadA fused to TadA*7.10 with Y147R and Q154S mutations (TadA*8.21). In some embodiments, the ABE8 is ABE8.22-d, which has a heterodimeric construct containing wild-type E. coli TadA fused to TadA*7.10 with V82S and Q154S mutations (TadA*8.22). In some embodiments, the ABE8 is ABE8.23-d, which has a heterodimeric construct containing wild-type E. coli TadA fused to TadA*7.10 with V82S and Y123H (Y123H reverted from H123Y) mutations (TadA*8.23). In some embodiments, the ABE8 is ABE8.24-d, which has a heterodimeric construct containing wild-type E. coli TadA fused to TadA*7.10 with V82S, Y123H (Y123H reverted from H123Y), and Y147T mutations (TadA*8.24).

[0687] In some embodiments, the ABE8 has a heterodimeric construct containing TadA*7.10 fused to a TadA*8 variant (“ABE8.x-7”). In some embodiments, the ABE8 is ABE8.1-7, which has a heterodimeric construct containing TadA*7.10 fused to TadA*7.10 with a Y147T mutation (TadA*8.1). In some embodiments, the ABE8 is ABE8.2-7, which has a heterodimeric construct containing TadA*7.10 fused to TadA*7.10 with a Y147R mutation (TadA*8.2). In some embodiments, the ABE8 is ABE8.3-7, which has a heterodimeric construct containing TadA*7.10 fused to TadA*7.10 with a Q154S mutation (TadA*8.3). In some embodiments, the ABE8 is ABE8.4-7, which has a heterodimeric construct containing TadA*7.10 fused to TadA*7.10 with a Y123H mutation (TadA*8.4). In some embodiments, the ABE8 is ABE8.5-7, which has a heterodimeric construct containing TadA*7.10 fused to TadA*7.10 with a V82S mutation (TadA*8.5). In some embodiments, the ABE8 is ABE8.6-7, which has a heterodimeric construct containing TadA*7.10 fused to TadA*7.10 with a T166R mutation (TadA*8.6). In some embodiments, the ABE8 is ABE8.7-7, which has a heterodimeric construct containing TadA*7.10 fused to TadA*7.10 with a Q154R mutation (TadA*8.7). In some embodiments, the ABE8 is ABE8.8-7, which has a heterodimeric construct containing TadA*7.10 fused to TadA*7.10 with Y147R, Q154R, and Y123H mutations (TadA*8.8). In some embodiments, the ABE8 is ABE8.9-7, which has a heterodimeric construct containing TadA*7.10 fused to TadA*7.10 with Y147R, Q154R and I76Y mutations (TadA*8.9). In some embodiments, the ABE8 is ABE8.10-7, which has a heterodimeric construct containing TadA*7.10 fused to TadA*7.10 with Y147R, Q154R, and T166R mutations (TadA*8.10). In some embodiments, the ABE8 is ABE8.11-7, which has a heterodimeric construct containing TadA*7.10 fused to TadA*7.10 with Y147T and Q154R mutations (TadA*8.11). In some embodiments, the ABE8 is ABE8.12-7, which has a heterodimeric construct containing TadA*7.10 fused to TadA*7.10 with Y147T and Q154S mutations (TadA*8.12). In some embodiments, the ABE8 is ABE8.13-7, which has a heterodimeric construct containing TadA*7.10 fused to TadA*7.10 with Y123H (Y123H reverted from H123Y), Y147R, Q154R and I76Y mutations (TadA*8.13). In some embodiments, the ABE8 is ABE8.14-7, which has a heterodimeric construct containing TadA*7.10 fused to TadA*7.10 with I76Y and V82S mutations (TadA*8.14). In some embodiments, the ABE8 is ABE8.15-7, which has a heterodimeric construct containing TadA*7.10 fused to TadA*7.10 with V82S and Y147R mutations (TadA*8.15). In some embodiments, the ABE8 is ABE8.16-7, which has a heterodimeric construct containing TadA*7.10 fused to TadA*7.10 with V82S, Y123H (Y123H reverted from H123Y) and Y147R mutations (TadA*8.16). In some embodiments, the ABE8 is ABE8.17-7, which has a heterodimeric construct containing TadA*7.10 fused to TadA*7.10 with V82S and Q154R mutations (TadA*8.17). In some embodiments, the ABE8 is ABE8.18-7, which has a heterodimeric construct containing TadA*7.10 fused to TadA*7.10 with V82S, Y123H (Y123H reverted from H123Y) and Q154R mutations (TadA*8.18). In some embodiments, the ABE8 is ABE8.19-7, which has a heterodimeric construct containing TadA*7.10 fused to TadA*7.10 with V82S, Y123H (Y123H reverted from H123Y), Y147R and Q154R mutations (TadA*8.19). In some embodiments, the ABE8 is ABE8.20-7, which has a heterodimeric construct containing TadA*7.10 fused to TadA*7.10 with I76Y, V82S, Y123H (Y123H reverted from H123Y), Y147R and Q154R mutations (TadA*8.20). In some embodiments, the ABE8 is ABE8.21-7, which has a heterodimeric construct containing TadA*7.10 fused to TadA*7.10 with Y147R and Q154S mutations (TadA*8.21). In some embodiments, the ABE8 is ABE8.22-7, which has a heterodimeric construct containing TadA*7.10 fused to TadA*7.10 with V82S and Q154S mutations (TadA*8.22). In some embodiments, the ABE8 is ABE8.23-7, which has a heterodimeric construct containing TadA*7.10 fused to TadA*7.10 with V82S and Y123H (Y123H reverted from H123Y) mutations (TadA*8.23). In some embodiments, the ABE8 is ABE8.24-7, which has a heterodimeric construct containing TadA*7.10 fused to TadA*7.10 with V82S, Y123H (Y123H reverted from H123Y), and Y147T mutations (TadA*8.24).

[0688] In some embodiments, the ABE is ABE8.1-m, ABE8.2-m, ABE8.3-m, ABE8.4-m, ABE8.5-m, ABE8.6-m, ABE8.7-m, ABE8.8-m, ABE8.9-m, ABE8.10-m, ABE8.11-m, ABE8.12-m, ABE8.13-m, ABE8.14-m, ABE8.15-m, ABE8.16-m, ABE8.17-m, ABE8.18-m, ABE8.19-m, ABE8.20-m, ABE8.21-m, ABE8.22-m, ABE8.23-m, ABE8.24-m, ABE8.1-d, ABE8.2-d, ABE8.3-d, ABE8.4-d, ABE8.5-d, ABE8.6-d, ABE8.7-d, ABE8.8-d, ABE8.9-d, ABE8.10-d, ABE8.11-d, ABE8.12-d, ABE8.13-d, ABE8.14-d, ABE8.15-d, ABE8.16-d, ABE8.17-d, ABE8.18-d, ABE8.19-d, ABE8.20-d, ABE8.21-d, ABE8.22-d, ABE8.23-d, or ABE8.24-d as shown in Table 10 below.

TABLE 10
Adenosine Deaminase Base Editor 8 (ABE8) Variants

| | Adenosine | |
|---|---|---|
| ABE8 | Deaminase | Adenosine Deaminase Description |
| ABE8.1-m | TadA*8.1 | Monomer_TadA*7.10 + Y147T |
| ABE8.2-m | TadA*8.2 | Monomer_TadA*7.10 + Y147R |
| ABE8.3-m | TadA*8.3 | Monomer_TadA*7.10 + Q154S |
| ABE8.4-m | TadA*8.4 | Monomer_TadA*7.10 + Y123H |
| ABE8.5-m | TadA*8.5 | Monomer_TadA*7.10 + V82S |
| ABE8.6-m | TadA*8.6 | Monomer_TadA*7.10 + T166R |
| ABE8.7-m | TadA*8.7 | Monomer_TadA*7.10 + Q154R |
| ABE8.8-m | TadA*8.8 | Monomer_TadA7.10 + Y147R_Q154R_Y123H |
| ABE8.9-m | TadA*8.9 | Monomer_TadA*7.10 + Y147R_Q154R_I76Y |
| ABE8.10- | TadA*8.10 | Monomer_TadA*7.10 + Y147R_Q154R_T166R |
| m | | |
| ABE8.11- | TadA*8.11 | Monomer_TadA*7.10 + Y147T_Q154R |
| m | | |
| ABE8.12- | TadA*8.12 | Monomer_TadA*7.10 + Y147T_Q154S |
| m | | |
| ABE8.13- | TadA*8.13 | Monomer_TadA*7.10 + Y123H_Y147R_Q154R_176Y |
| m | | |
| ABE8.14- | TadA*8.14 | Monomer_TadA*7.10 + I76Y_V82S |
| m | | |
| ABE8.15- | TadA*8.15 | Monomer_TadA*7.10 + V82S_Y147R |
| m | | |
| ABE8.16- | TadA*8.16 | Monomer_TadA*7.10 + V82S_Y123H_Y147R |
| m | | |
| ABE8.17- | TadA*8.17 | Monomer_TadA*7.10 + V82S_Q154R |
| m | | |
| ABE8.18- | TadA*8.18 | Monomer_TadA*7.10 + V82S_Y123H_Q154R |
| m | | |
| ABE8.19- | TadA*8.19 | Monomer_TadA*7.10 + V82S_Y123H_Y147R_Q154R |
| m | | |
| ABE8.20- | TadA*8.20 | Monomer_TadA*7.10 + I76Y_V82S_Y123H_Y147R_Q154R |
| m | | |
| ABE8.21- | TadA*8.21 | Monomer_TadA*7.10 + Y147R_Q154S |
| m | | |
| ABE8.22- | TadA*8.22 | Monomer_TadA*7.10 + V82S_Q154S |
| m | | |
| ABE8.23- | TadA*8.23 | Monomer_TadA*7.10 + V82S_Y123H |
| m | | |
| ABE8.24- | TadA*8.24 | Monomer_TadA*7.10 + V82S_Y123H_Y147T |
| m | | |
| ABE8.1-d | TadA*8.1 | Heterodimer_(WT) + (TadA*7.10 + Y147T) |
| ABE8.2-d | TadA*8.2 | Heterodimer_(WT) + (TadA*7.10 + Y147R) |
| ABE8.3-d | TadA*8.3 | Heterodimer_(WT) + (TadA*7.10 + Q154S) |
| ABE8.4-d | TadA*8.4 | Heterodimer_(WT) + (TadA*7.10 + Y123H) |
| ABE8.5-d | TadA*8.5 | Heterodimer_(WT) + (TadA*7.10 + V82S) |
| ABE8.6-d | TadA*8.6 | Heterodimer_(WT) + (TadA*7.10 + T166R) |
| ABE8.7-d | TadA*8.7 | Heterodimer_(WT) + (TadA*7.10 + Q154R) |
| ABE8.8-d | TadA*8.8 | Heterodimer_(WT) + (TadA*7.10 + Y147R_Q154R_Y123H) |
| ABE8.9-d | TadA*8.9 | Heterodimer_(WT) + (TadA*7.10 + Y147R_Q154R_I76Y) |
| ABE8.10-d | TadA*8.10 | Heterodimer_(WT) + (TadA*7.10 + Y147R_Q154R_T166R) |
| ABE8.11-d | TadA*8.11 | Heterodimer_(WT) + (TadA*7.10 + Y147T_Q154R) |
| ABE8.12-d | TadA*8.12 | Heterodimer_(WT) + (TadA*7.10 + Y147T_Q154S) |
| ABE8.13-d | TadA*8.13 | Heterodimer_(WT) + (TadA*7.10 + |
| | | Y123H_Y147T_Q154R_176Y) |
| ABE8.14-d | TadA*8.14 | Heterodimer_(WT) + (TadA*7.10 + I76Y_V82S) |
| ABE8.15-d | TadA*8.15 | Heterodimer_(WT) + (TadA*7.10 + V82S_Y147R) |
| ABE8.16-d | TadA*8.16 | Heterodimer_(WT) + (TadA*7.10 + V82S_Y123H_Y147R) |
| ABE8.17-d | TadA*8.17 | Heterodimer_(WT) + (TadA*7.10 + V82S_Q154R) |
| ABE8.18-d | TadA*8.18 | Heterodimer_(WT) + (TadA*7.10 + V82S_Y123H_Q154R) |
| ABE8.19-d | TadA*8.19 | Heterodimer_(WT) + (TadA*7.10 + |
| | | V82S_Y123H_Y147R_Q154R) |
| ABE8.20-d | TadA*8.20 | Heterodimer_(WT) + (TadA*7.10 + |
| | | I76Y_V82S_Y123H_Y147R_Q154R) |
| ABE8.21-d | TadA*8.21 | Heterodimer_(WT) + (TadA*7.10 + Y147R_Q154S) |
| ABE8.22-d | TadA*8.22 | Heterodimer_(WT) + (TadA*7.10 + V82S_Q154S) |
| ABE8.23-d | TadA*8.23 | Heterodimer_(WT) + (TadA*7.10 + V82S_Y123H) |
| ABE8.24-d | TadA*8.24 | Heterodimer_(WT) + (TadA*7.10 + V82S_Y123H_Y147T) |

[0689] In some embodiments, the ABE8 is ABE8a-m, which has a monomeric construct containing TadA*7.10 with R26C, A109S, T111R, D119N, H122N, Y147D, F149Y, T166I, and D167N mutations (TadA*8a). In some embodiments, the ABE8 is ABE8b-m, which has a monomeric construct containing TadA*7.10 with V88A, A109S, T111R, D119N, H122N, F149Y, T166I, and D167N mutations (TadA*8b). In some embodiments, the ABE8 is ABE8c-m, which has a monomeric construct containing TadA*7.10 with R26C, A109S, T111R, D119N, H122N, F149Y, T166I, and D167N mutations (TadA*8c). In some embodiments, the ABE8 is ABE8d-m, which has a monomeric construct containing TadA*7.10 with V88A, T111R, D119N, and F149Y mutations (TadA*8d). In some embodiments, the ABE8 is ABE8e-m, which has a monomeric construct containing TadA*7.10 with A109S, T111R, D119N, H122N, Y147D, F149Y, T166I, and D167N mutations (TadA*8e).

[0690] In some embodiments, the ABE8 is ABE8a-d, which has a heterodimeric construct containing wild-type E. coli TadA fused to TadA*7.10 with R26C, A109S, T111R, D119, H122N, Y147D, F149Y, T166I, and D167N mutations (TadA*8a). In some embodiments, the ABE8 is ABE8b-d, which has a heterodimeric construct containing wild-type E. coli TadA fused to TadA*7.10 with V88A, A109S, T111R, D119N, H122N, F149Y, T166I, and D167N mutations (TadA*8b). In some embodiments, the ABE8 is ABE8c-d, which has a heterodimeric construct containing wild-type E. coli TadA fused to TadA*7.10 with R26C, A109S, T111R, D119N, H122N, F149Y, T166I, and D167N mutations (TadA*8c). In some embodiments, the ABE8 is ABE8d-d, which has a heterodimeric construct containing wild-type E. coli TadA fused to TadA*7.10 with V88A, T111R, D119N, and F149Y mutations (TadA*8d). In some embodiments, the ABE8 is ABE8e-d, which has a heterodimeric construct containing wild-type E. coli TadA fused to TadA*7.10 with A109S, T111R, D119N, H122N, Y147D, F149Y, T166I, and D167N mutations (TadA*8e).

[0691] In some embodiments, the ABE8 is ABE8a-7, which has a heterodimeric construct containing TadA*7.10 fused to TadA*7.10 with R26C, A109S, T111R, D119, H122N, Y147D, F149Y, T166I, and D167N mutations (TadA*8a). In some embodiments, the ABE8 is ABE8b-7, which has a heterodimeric construct containing TadA*7.10 fused to TadA*7.10 with V88A, A109S, T111R, D119N, H122N, F149Y, T166I, and D167N mutations (TadA*8b). In some embodiments, the ABE8 is ABE8c-7, which has a heterodimeric construct containing TadA*7.10 fused to TadA*7.10 with R26C, A109S, T111R, D119N, H122N, F149Y, T166I, and D167N mutations (TadA*8c). In some embodiments, the ABE8 is ABE8d-7, which has a heterodimeric construct containing TadA*7.10 fused to TadA*7.10 with V88A, T111R, D119N, and F149Y mutations (TadA*8d). In some embodiments, the ABE8 is ABE8e-7, which has a heterodimeric construct containing TadA*7.10 fused to TadA*7.10 with A109S, T111R, D119N, H122N, Y147D, F149Y, T166I, and D167N mutations (TadA*8e).

[0692] In some embodiments, the ABE is ABE8a-m, ABE8b-m, ABE8c-m, ABE8d-m, ABE8e-m, ABE8a-d, ABE8b-d, ABE8c-d, ABE8d-d, or ABE8e-d, as shown in Table 11 below. In some embodiments, the ABE is ABE8e-m or ABE8e-d. ABE8e shows efficient adenine base editing activity and low indel formation when used with Cas homologues other than SpCas9, for example, SaCas9, SaCas9-KKH, Cas12a homologues, e.g., LbCas12a, enAs-Cas12a, SpCas9-NG and circularly permuted CP1028-SpCas9 and CP1041-SpCas9. In addition to the mutations shown for ABE8e in Table 11, off-target RNA and DNA editing were reduced by introducing a V106W substitution into the TadA domain (as described in M. Richter et al., 2020, Nature Biotechnology, doi.org/10.1038/s41587-020-0453-z, the entire contents of which are incorporated by reference herein).

TABLE 11
Additional Adenosine Deaminase Base Editor 8 Variants

| ABE8 Base | Adenosine | |
|---|---|---|
| Editor | Deaminase | Adenosine Deaminase Description |
| ABE8a-m | TadA*8a | Monomer_*7.10 + R26C + A109S + T111R + D119N + |
| | | H122N + Y147D + F149Y + T166I + D167N |
| ABE8b-m | TadA*8b | Monomer_TadA*7.10 + V88A + A109S + T111R + D119N + |
| | | H122N + F149Y + T166I + D167N |
| ABE8c-m | TadA*8c | Monomer_TadA*7.10 + R26C + A109S + T111R + D119N + |
| | | H122N + F149Y + T166I + D167N |
| ABE8d-m | TadA*8d | Monomer_TadA*7.10 + V88A + T111R + D119N + F149Y |
| ABE8e-m | TadA*8e | Monomer_TadA*7.10 + A109S + T111R + D119N + H122N + |
| | | Y147D+ F149Y + T166I + D167N |
| ABE8a-d | TadA*8a | Heterodimer_(WT) + (TadA*7.10 + R26C + A109S + T111R + |
| | | D119N+ H122N+ Y147D + F149Y+ T166I+ D167N) |
| ABE8b-d | TadA*8b | Heterodimer_(WT) + (TadA*7.10 + V88A + A109S + T111R + |
| | | D119N + H122N + F149Y + T166I +D167N) |
| ABE8c-d | TadA*8c | Heterodimer_(WT) + (TadA*7.10 + R26C + A109S + T111R + |
| | | D119N + H122N + F149Y + T166I+ D167N) |
| ABE8d-d | TadA*8d | Heterodimer_(WT) + (TadA*7.10 + V88A + T111R + D119N + |
| | | F149Y) |
| ABE8e-d | TadA*8e | Heterodimer_(WT) + (TadA*7.10 + A109S + T111R + D119N + |
| | | H122N+Y147D+ F149Y + T166I + D167N) |

[0693] In some embodiments, base editors (e.g., ABE8) are generated by cloning an adenosine deaminase variant (e.g., TadA*8) into a scaffold that includes a circular permutant Cas9 (e.g., CP5 or CP6) and a bipartite nuclear localization sequence. In some embodiments, the base editor (e.g., ABE7.9, ABE7.10, or ABE8) is an NGC PAM CP5 variant (S. pyogenes Cas9 or spVRQR Cas9). In some embodiments, the base editor (e.g., ABE7.9, ABE7.10, or ABE8) is an AGA PAM CP5 variant (S. pyogenes Cas9 or spVRQR Cas9). In some embodiments, the base editor (e.g., ABE7.9, ABE7.10, or ABE8) is an NGC PAM CP6 variant (S. pyogenes Cas9 or spVRQR Cas9). In some embodiments, the base editor (e.g. ABE7.9, ABE7.10, or ABE8) is an AGA PAM CP6 variant (S. pyogenes Cas9 or spVRQR Cas9).

[0694] In some embodiments, the ABE has a genotype as shown in Table 12 below.

TABLE 12
Genotypes of ABEs

| | 23 | 26 | 36 | 37 | 48 | 49 | 51 | 72 | 84 | 87 | 105 | 108 | 123 | 125 | 142 | 145 | 147 | 152 | 155 | 156 | 157 | 161 |
|---|---|---|---|---|---|---|---|---|---|---|---|---|---|---|---|---|---|---|---|---|---|---|
| ABE7.9 | L | R | L | N | A | | L | N | F | S | V | N | Y | G | N | C | Y | P | V | F | N | K |
| ABE7.10 | R | R | L | N | A | | L | N | F | S | V | N | Y | G | A | C | Y | P | V | F | N | K |

[0695] As shown in Table 13 below, genotypes of 40 ABE8s are described. Residue positions in the evolved E. coli TadA portion of ABE are indicated. Mutational changes in ABE8 are shown when distinct from ABE7.10 mutations. In some embodiments, the ABE has a genotype of one of the ABEs as shown in Table 13 below.

TABLE 13
Residue Identity in Evolved TadA

| | 23 | 36 | 48 | 51 | 76 | 82 | 84 | 106 | 108 | 123 | 146 | 147 | 152 | 154 | 155 | 156 | 157 | 166 |
|---|---|---|---|---|---|---|---|---|---|---|---|---|---|---|---|---|---|---|
| ABE7.10 | R | L | A | L | I | V | F | V | N | Y | C | Y | P | Q | V | F | N | T |
| ABE8.1-m | | | | | | | | | | | | T | | | | | | |
| ABE8.2-m | | | | | | | | | | | | R | | | | | | |
| ABE8.3-m | | | | | | | | | | | | | | S | | | | |
| ABE8.4-m | | | | | | | | | | H | | | | | | | | |
| ABE8.5-m | | | | | | S | | | | | | | | | | | | |
| ABE8.6-m | | | | | | | | | | | | | | | | | | R |
| ABE8.7-m | | | | | | | | | | | | | | R | | | | |
| ABE8.8-m | | | | | | | | | | H | | R | | R | | | | |
| ABE8.9-m | | | | | Y | | | | | | | R | | R | | | | |
| ABE8.10-m | | | | | | | | | | | | R | | R | | | | R |
| ABE8.11-m | | | | | | | | | | | | T | | R | | | | |
| ABE8.12-m | | | | | | | | | | | | T | | S | | | | |
| ABE8.13-m | | | | | Y | | | | | H | | R | | R | | | | |
| ABE8.14-m | | | | | Y | S | | | | | | | | | | | | |
| ABE8.15-m | | | | | | S | | | | | | R | | | | | | |
| ABE8.16-m | | | | | | S | | | | H | | R | | | | | | |
| ABE8.17-m | | | | | | S | | | | | | | | R | | | | |
| ABE8.18-m | | | | | | S | | | | H | | | | R | | | | |
| ABE8.19-m | | | | | | S | | | | H | | R | | R | | | | |
| ABE8.20-m | | | | | Y | S | | | | H | | R | | R | | | | |
| ABE8.21-m | | | | | | | | | | | | R | | S | | | | |
| ABE8.22-m | | | | | | S | | | | | | | | S | | | | |
| ABE8.23-m | | | | | | S | | | | H | | | | | | | | |
| ABE8.24-m | | | | | | S | | | | H | | T | | | | | | |
| ABE8.1-d | | | | | | | | | | | | T | | | | | | |
| ABE8.2-d | | | | | | | | | | | | R | | | | | | |
| ABE8.3-d | | | | | | | | | | | | | | S | | | | |
| ABE8.4-d | | | | | | | | | | H | | | | | | | | |
| ABE8.5-d | | | | | | S | | | | | | | | | | | | |
| ABE8.6-d | | | | | | | | | | | | | | | | | | R |
| ABE8.7-d | | | | | | | | | | | | | | R | | | | |
| ABE8.8-d | | | | | | | | | | H | | R | | R | | | | |
| ABE8.9-d | | | | | Y | | | | | | | R | | R | | | | |
| ABE8.10-d | | | | | | | | | | | | R | | R | | | | R |
| ABE8.11-d | | | | | | | | | | | | T | | R | | | | |
| ABE8.12-d | | | | | | | | | | | | T | | S | | | | |
| ABE8.13-d | | | | | Y | | | | | H | | R | | R | | | | |
| ABE8.14-d | | | | | Y | S | | | | | | | | | | | | |
| ABE8.15-d | | | | | | S | | | | | | R | | | | | | |
| ABE8.16-d | | | | | | S | | | | H | | R | | | | | | |
| ABE8.17-d | | | | | | S | | | | | | | | R | | | | |
| ABE8.18-d | | | | | | S | | | | H | | | | R | | | | |
| ABE8.19-d | | | | | | S | | | | H | | R | | R | | | | |
| ABE8.20-d | | | | | Y | S | | | | H | | R | | R | | | | |
| ABE8.21-d | | | | | | | | | | | | R | | S | | | | |
| ABE8.22-d | | | | | | S | | | | | | | | S | | | | |
| ABE8.23-d | | | | | | S | | | | H | | | | | | | | |
| ABE8.24-d | | | | | | S | | | | H | | T | | | | | | |

[0696] In some embodiments, the base editor is ABE8.1, which comprises or consists essentially of the following sequence or a fragment thereof having adenosine deaminase activity:

ABE8.1 Y147T CP5 NGC PAM monomer
(SEQ ID NO: 331)
MSEVEFSHEYWMRHALTLAKRARDEREVPVGAVLVLNNRVIGEGWNRAIGLHDPTAHAEIMA
LRQGGLVMQNYRLIDATLYVTFEPCVMCAGAMIHSRIGRVVFGVRNAKTGAAGSLMDVLHYP
GMNHRVEITEGILADECAALLCTFFRMPRQVFNAQKKAQSSTD [symbol] [symbol]
EIGKATAKYFFYSNIMNFFKTEITLANGEIRKRPLIETNGETGEIVWDK
GRDFATVRKVLSMPQVNIVKKTEVQTGGFSKESILPKRNSDKLIARKKDWDPKKYGGFMQPT
VAYSVLVVAKVEKGKSKKLKSVKELLGITIMERSSFEKNPIDFLEAKGYKEVKKDLIIKLPK
YSLFELENGRKRMLASAKFLQKGNELALPSKYVNFLYLASHYEKLKGSPEDNEQKQLFVEQH
KHYLDEIIEQISEFSKRVILADANLDKVLSAYNKHRDKPIREQAENIIHLFTLTNLGAPRAF
KYFDTTIARKEYRSTKEVLDATLIHQSITGLYETRIDLSQLGGD [symbol] [symbol]
DKKYSIGLAIGTNSVGWAVITDEYKVPSKKFKVLGNTDRHSIKKNLIGALLFDSGETAE
ATRLKRTARRRYTRRKNRICYLQEIFSNEMAKVDDSFFHRLEESFLVEEDKKHERHPIFGNI
VDEVAYHEKYPTIYHLRKKLVDSTDKADLRLIYLALAHMIKFRGHFLIEGDLNPDNSDVDKL
FIQLVQTYNQLFEENPINASGVDAKAILSARLSKSRRLENLIAQLPGEKKNGLFGNLIALSL
GLTPNFKSNFDLAEDAKLQLSKDTYDDDLDNLLAQIGDQYADLFLAAKNLSDAILLSDILRV
NTEITKAPLSASMIKRYDEHHQDLTLLKALVRQQLPEKYKEIFFDQSKNGYAGYIDGGASQE
EFYKFIKPILEKMDGTEELLVKLNREDLLRKQRTFDNGSIPHQIHLGELHAILRRQEDFYPF
LKDNREKIEKILTFRIPYYVGPLARGNSRFAWMTRKSEETITPWNFEEVVDKGASAQSFIER
MTNFDKNLPNEKVLPKHSLLYEYFTVYNELTKVKYVTEGMRKPAFLSGEQKKAIVDLLFKTN
RKVTVKQLKEDYFKKIECFDSVEISGVEDRFNASLGTYHDLLKIIKDKDFLDNEENEDILED
IVLTLTLFEDREMIEERLKTYAHLFDDKVMKQLKRRRYTGWGRLSRKLINGIRDKQSGKTIL
DFLKSDGFANRNFMQLIHDDSLTFKEDIQKAQVSGQGDSLHEHIANLAGSPAIKKGILQTVK
VVDELVKVMGRHKPENIVIEMARENQTTQKGQKNSRERMKRIEEGIKELGSQILKEHPVENT
QLQNEKLYLYYLQNGRDMYVDQELDINRLSDYDVDHIVPQSFLKDDSIDNKVLTRSDKNRGK
SDNVPSEEVVKKMKNYWRQLLNAKLITQRKFDNLTKAERGGLSELDKAGFIKRQLVETRQIT
KHVAQILDSRMNTKYDENDKLIREVKVITLKSKLVSDFRKDFQFYKVREINNYHHAHDAYLN
AVVGTALIKKYPKLESEFVYGDYKVYDVRKMIAKSEQEGADKRTADGSEFESPKKKRKV

[0697] In the above sequence, the plain text denotes an adenosine deaminase sequence, bold sequence indicates sequence derived from Cas9, the italicized sequence denotes a linker sequence, and the underlined sequence denotes a bipartite nuclear localization sequence. Other ABE8 sequences are provided in the attached sequence listing (SEQ ID NOs: 332-354).

[0698] In some embodiments, the base editor includes an adenosine deaminase variant comprising an amino acid sequence, which contains alterations relative to an ABE 7*10 reference sequence, as described herein. The term “monomer” as used in Table 14A refers to a monomeric form of TadA*7.10 comprising the alterations described. The term “heterodimer” as used in Table 14A refers to the specified wild-type E. coli TadA adenosine deaminase fused to a TadA*7.10 comprising the alterations as described.

TABLE 14A
Adenosine Deaminase Base Editor Variants

| | Adenosine | |
|---|---|---|
| ABE | Deaminase | Adenosine Deaminase Description |
| ABE-605m | MSP605 | monomer_TadA*7.10 + V82G + Y147T + Q154S |
| ABE-680m | MSP680 | monomer_TadA*7.10 + 176Y + V82G + Y147T + Q154S |
| ABE-823m | MSP823 | monomer_TadA*7.10 + L36H + V82G + Y147T + Q154S + |
| | | N157K |
| ABE-824m | MSP824 | monomer_TadA*7.10 + V82G + Y147D + F149Y + Q154S + |
| | | D167N |
| ABE-825m | MSP825 | monomer_TadA*7.10 + L36H + V82G + Y147D + F149Y + |
| | | Q154S + N157K + D167N |
| ABE-827m | MSP827 | monomer_TadA*7.10 + L36H + 176Y + V82G + Y147T + Q154S + |
| | | N157K |
| ABE-828m | MSP828 | monomer_TadA*7.10 + 176Y + V82G + Y147D + F149Y + Q154S + |
| | | D167N |
| ABE-829m | MSP829 | monomer_TadA*7.10 + L36H + 176Y + V82G + Y147D + F149Y + |
| | | Q154S + N157K + D167N |
| ABE-605d | MSP605 | heterodimer_(WT) + (TadA*7.10 + V82G + Y147T + Q154S) |
| ABE-680d | MSP680 | heterodimer_(WT) + (TadA*7.10 + I76Y + V82G + Y147T + |
| | | Q154S) |
| ABE-823d | MSP823 | heterodimer_(WT) + (TadA*7.10 + L36H + V82G + Y147T + |
| | | Q154S + N157K) |
| ABE-824d | MSP824 | heterodimer_(WT) + (TadA*7.10 + V82G + Y147D + F149Y + |
| | | Q154S + D167N) |
| ABE-825d | MSP825 | heterodimer_(WT) + (TadA*7.10 + L36H + V82G + Y147D + |
| | | F149Y + Q154S + N157K + D167N) |
| ABE-827d | MSP827 | heterodimer_(WT) + (TadA*7.10 + L36H + 176Y + V82G + Y147T + |
| | | Q154S + N157K) |
| ABE-828d | MSP828 | heterodimer_(WT) + (TadA*7.10 + I76Y + V82G + Y147D + |
| | | F149Y + Q154S + D167N) |
| ABE-829d | MSP829 | heterodimer_(WT) + (TadA*7.10 + L36H + 176Y + V82G + Y147D + |
| | | F149Y + Q154S + N157K + D167N) |

[0699] In some embodiments, the base editor is a ninth generation ABE (ABE9). In some embodiments, the ABE9 contains a TadA*9 variant. ABE9 base editors include an adenosine deaminase variant comprising an amino acid sequence, which contains alterations relative to an ABE 7*10 reference sequence, as described herein. Exemplary ABE9 variants are listed in Table 14A.

[0700] Details of ABE9 base editors are described in International PCT Application No. PCT/2020/049975, which is incorporated herein by reference for its entirety, and are listed in Table 14B. In Table 14B, “monomer” indicates an ABE comprising a single TadA*7.10 comprising the indicated alterations and “heterodimer” indicates an ABE comprising a TadA*7.10 comprising the indicated alterations fused to an E. coli TadA adenosine deaminase.

TABLE 14B
Adenosine Base Editor 9 (ABE9) Variants.

| ABE9 Description | Alterations |
|---|---|
| ABE9.1_monomer | E25F, V82S, Y123H, T133K, Y147R, Q154R |
| ABE9.2_monomer | E25F, V82S, Y123H, Y147R, Q154R |
| ABE9.3_monomer | V82S, Y123H, P124W, Y147R, Q154R |
| ABE9.4_monomer | L51W, V82S, Y123H, C146R, Y147R, Q154R |
| ABE9.5_ monomer | P54C, V82S, Y123H, Y147R, Q154R |
| ABE9.6_monomer | Y73S, V82S, Y123H, Y147R, Q154R |
| ABE9.7_monomer | N38G, V82T, Y123H, Y147R, Q154R |
| ABE9.8_monomer | R23H, V82S, Y123H, Y147R, Q154R |
| ABE9.9_monomer | R21N, V82S, Y123H, Y147R, Q154R |
| ABE9.10_monomer | V82S, Y123H, Y147R, Q154R, A158K |
| ABE9.11_monomer | N72K, V82S, Y123H, D139L, Y147R, Q154R, |
| ABE9.12_monomer | E25F, V82S, Y123H, D139M, Y147R, Q154R |
| ABE9.13_monomer | M70V, V82S, M94V, Y123H, Y147R, Q154R |
| ABE9.14_monomer | Q71M, V82S, Y123H, Y147R, Q154R |
| ABE9.15_heterodimer | E25F, V82S, Y123H, T133K, Y147R, Q154R |
| ABE9.16_heterodimer | E25F, V82S, Y123H, Y147R, Q154R |
| ABE9.17_heterodimer | V82S, Y123H, P124W, Y147R, Q154R |
| ABE9.18_heterodimer | L51W, V82S, Y123H, C146R, Y147R, Q154R |
| ABE9.19_heterodimer | P54C, V82S, Y123H, Y147R, Q154R |
| ABE9.2_heterodimer | Y73S, V82S, Y123H, Y147R, Q154R |
| ABE9.21_heterodimer | N38G, V82T, Y123H, Y147R, Q154R |
| ABE9.22_heterodimer | R23H, V82S, Y123H, Y147R, Q154R |
| ABE9.23_heterodimer | R2IN, V82S, Y123H, Y147R, Q154R |
| ABE9.24_heterodimer | V82S, Y123H, Y147R, Q154R, A158K |
| ABE9.25_heterodimer | N72K, V82S, Y123H, D139L, Y147R, Q154R, |
| ABE9.26_heterodimer | E25F, V82S, Y123H, D139M, Y147R, Q154R |
| ABE9.27_heterodimer | M70V, V82S, M94V, Y123H, Y147R, Q154R |
| ABE9.28_heterodimer | Q71M, V82S, Y123H, Y147R, Q154R |
| ABE9.29_monomer | E25F_I76Y_V82S_Y123H_Y147R_Q154R |
| ABE9.30_monomer | I76Y_V82T_Y123H_Y147R_Q154R |
| ABE9.31_monomer | N38G_I76Y_V82S_Y123H_Y147R_Q154R |
| ABE9.32_monomer | N38G_I76Y_V82T_Y123H_Y147R_Q154R |
| ABE9.33_monomer | R23H_I76Y_V82S_Y123H_Y147R_Q154R |
| ABE9.34_monomer | P54C_I76Y_V82S_Y123H_Y147R_Q154R |
| ABE9.35_monomer | R21N_I76Y_V82S_Y123H_Y147R_Q154R |
| ABE9.36_monomer | I76Y_V82S_Y123H_D138M_Y147R_Q154R |
| ABE9.37_monomer | Y72S_I76Y_V82S_Y123H_Y147R_Q154R |
| ABE9.38_heterodimer | E25F_I76Y_V82S_Y123H_Y147R_Q154R |
| ABE9.39_heterodimer | I76Y_V82T_Y123H_Y147R_Q154R |
| ABE9.40_heterodimer | N38G_I76YV82S_Y123H_Y147R_Q154R |
| ABE9.41_heterodimer | N38G_I76Y_V82T_Y123H_Y147R_Q154R |
| ABE9.42_heterodimer | R23H_I76Y_V82S_Y123H_Y147R_Q154R |
| ABE9.43_heterodimer | P54C_I76Y_V82S_Y123H_Y147R_Q154R |
| ABE9.44_heterodimer | R21N_I76Y_V82S_Y123H_Y147R_Q154R |
| ABE9.45_heterodimer | I76Y_V82S_Y123H_D138M_Y147R_Q154R |
| ABE9.46_heterodimer | Y72S_I76Y_V82S_Y123H_Y147R_Q154R |
| ABE9.47_monomer | N72K V82S, Y123H, Y147R, Q154R |
| ABE9.48_monomer | Q71M V82S, Y123H, Y147R, Q154R |
| ABE9.49_monomer | M70V, V82S, M94V, Y123H, Y147R, Q154R |
| ABE9.50_monomer | V82S, Y123H, T133K, Y147R, Q154R |
| ABE9.51_monomer | V82S, Y123H, T133K, Y147R, Q154R, |
| | A158K |
| ABE9.52_monomer | M70V, Q71M, N72K, V82S, Y123H, Y147R, |
| | Q154R |
| ABE9.53_heterodimer | N72K V82S, Y123H, Y147R, Q154R |
| ABE9.54_heterodimer | Q71M V82S, Y123H, Y147R, Q154R |
| ABE9.55_heterodimer | M70V,V82S, M94V, Y123H, Y147R, Q154R |
| ABE9.56_heterodimer | V82S, Y123H, T133K, Y147R, Q154R |
| ABE9.57_heterodimer | V82S, Y123H, T133K, Y147R, Q154R, |
| | A158K |
| ABE9.58_heterodimer | M70V, Q71M, N72K, V82S, Y123H, Y147R, |
| | Q154R |

[0701] In some embodiments, the base editor is a fusion protein comprising a polynucleotide programmable nucleotide binding domain (e.g., Cas9-derived domain) fused to a nucleobase editing domain (e.g., all or a portion of a deaminase domain). In certain embodiments, the fusion proteins provided herein comprise one or more features that improve the base editing activity of the fusion proteins. For example, any of the fusion proteins provided herein may comprise a Cas9 domain that has reduced nuclease activity. In some embodiments, any of the fusion proteins provided herein may have a Cas9 domain that does not have nuclease activity (dCas9), or a Cas9 domain that cuts one strand of a duplexed DNA molecule, referred to as a Cas9 nickase (nCas9).

[0702] In some embodiments, the base editor further comprises a domain comprising all or a portion of a uracil glycosylase inhibitor (UGI). In some embodiments, the base editor comprises a domain comprising all or a portion of a uracil binding protein (UBP), such as a uracil DNA glycosylase (UDG). In some embodiments, the base editor comprises a domain comprising all or a portion of a nucleic acid polymerase. In some embodiments, a base editor can comprise as a domain all or a portion of a nucleic acid polymerase (NAP). For example, a base editor can comprise all or a portion of a eukaryotic NAP. In some embodiments, a NAP or portion thereof incorporated into a base editor is a DNA polymerase. In some embodiments, a NAP or portion thereof incorporated into a base editor has translesion polymerase activity. In some embodiments, a NAP or portion thereof incorporated into a base editor is a translesion DNA polymerase. In some embodiments, a NAP or portion thereof incorporated into a base editor is a Rev7, Rev1 complex, polymerase iota, polymerase kappa, or polymerase eta. In some embodiments, a NAP or portion thereof incorporated into a base editor is a eukaryotic polymerase alpha, beta, gamma, delta, epsilon, gamma, eta, iota, kappa, lambda, mu, or nu component. In some embodiments, a NAP or portion thereof incorporated into a base editor comprises an amino acid sequence that is at least 75%, 80%, 85%, 90%, 95%, 96%, 97%, 98%, 99%, or 99.5% identical to a nucleic acid polymerase (e.g., a translesion DNA polymerase). In some embodiments, a nucleic acid polymerase or portion thereof incorporated into a base editor is a translesion DNA polymerase.

[0703] In some embodiments, a domain of the base editor can comprise multiple domains. For example, the base editor comprising a polynucleotide programmable nucleotide binding domain derived from Cas9 can comprise an REC lobe and an NUC lobe corresponding to the REC lobe and NUC lobe of a wild-type or natural Cas9. In another example, the base editor can comprise one or more of a RuvCI domain, BH domain, REC1 domain, REC2 domain, RuvCII domain, L1 domain, HNH domain, L2 domain, RuvCIII domain, WED domain, TOPO domain or CTD domain. In some embodiments, one or more domains of the base editor comprise a mutation (e.g., substitution, insertion, deletion) relative to a wild-type version of a polypeptide comprising the domain. For example, an HNH domain of a polynucleotide programmable DNA binding domain can comprise an H840A substitution. In another example, a RuvCI domain of a polynucleotide programmable DNA binding domain can comprise a D10A substitution.

[0704] Different domains (e.g., adjacent domains) of the base editor disclosed herein can be connected to each other with or without the use of one or more linker domains (e.g., an XTEN linker domain). In some embodiments, a linker domain can be a bond (e.g., covalent bond), chemical group, or a molecule linking two molecules or moieties, e.g., two domains of a fusion protein, such as, for example, a first domain (e.g., Cas9-derived domain) and a second domain (e.g., an adenosine deaminase domain). In some embodiments, a linker is a covalent bond (e.g., a carbon-carbon bond, disulfide bond, carbon-hetero atom bond, etc.). In certain embodiments, a linker is a carbon nitrogen bond of an amide linkage. In certain embodiments, a linker is a cyclic or acyclic, substituted or unsubstituted, branched or unbranched aliphatic or heteroaliphatic linker. In certain embodiments, a linker is polymeric (e.g., polyethylene, polyethylene glycol, polyamide, polyester, etc.). In certain embodiments, a linker comprises a monomer, dimer, or polymer of aminoalkanoic acid. In some embodiments, a linker comprises an aminoalkanoic acid (e.g., glycine, ethanoic acid, alanine, beta-alanine, 3-aminopropanoic acid, 4-aminobutanoic acid, 5-pentanoic acid, etc.). In some embodiments, a linker comprises a monomer, dimer, or polymer of aminohexanoic acid (Ahx). In certain embodiments, a linker is based on a carbocyclic moiety (e.g., cyclopentane, cyclohexane). In other embodiments, a linker comprises a polyethylene glycol moiety (PEG). In certain embodiments, a linker comprises an aryl or heteroaryl moiety. In certain embodiments, the linker is based on a phenyl ring. A linker can include functionalized moieties to facilitate attachment of a nucleophile (e.g., thiol, amino) from the peptide to the linker. Any electrophile can be used as part of the linker. Exemplary electrophiles include, but are not limited to, activated esters, activated amides, Michael acceptors, alkyl halides, aryl halides, acyl halides, and isothiocyanates. In some embodiments, a linker joins a gRNA binding domain of an RNA-programmable nuclease, including a Cas9 nuclease domain, and the catalytic domain of a nucleic acid editing protein. In some embodiments, a linker joins a dCas9 and a second domain (e.g., UGI, etc.).

### Linkers

[0705] In certain embodiments, linkers may be used to link any of the peptides or peptide domains as described herein. The linker may be as simple as a covalent bond, or it may be a polymeric linker many atoms in length. In certain embodiments, the linker is a polypeptide or based on amino acids. In other embodiments, the linker is not peptide-like. In certain embodiments, the linker is a covalent bond (e.g., a carbon-carbon bond, disulfide bond, carbon-heteroatom bond, etc.). In certain embodiments, the linker is a carbon-nitrogen bond of an amide linkage. In certain embodiments, the linker is a cyclic or acyclic, substituted or unsubstituted, branched or unbranched aliphatic or heteroaliphatic linker. In certain embodiments, the linker is polymeric (e.g., polyethylene, polyethylene glycol, polyamide, polyester, etc.). In certain embodiments, the linker comprises a monomer, dimer, or polymer of aminoalkanoic acid. In certain embodiments, the linker comprises an aminoalkanoic acid (e.g., glycine, ethanoic acid, alanine, beta-alanine, 3-aminopropanoic acid, 4-aminobutanoic acid, 5-pentanoic acid, etc.). In certain embodiments, the linker comprises a monomer, dimer, or polymer of aminohexanoic acid (Ahx). In certain embodiments, the linker is based on a carbocyclic moiety (e.g., cyclopentane, cyclohexane). In other embodiments, the linker comprises a polyethylene glycol moiety (PEG). In other embodiments, the linker comprises amino acids. In certain embodiments, the linker comprises a peptide. In certain embodiments, the linker comprises an aryl or heteroaryl moiety. In certain embodiments, the linker is based on a phenyl ring. The linker may include functionalized moieties to facilitate attachment of a nucleophile (e.g., thiol, amino) from the peptide to the linker. Any electrophile may be used as part of the linker. Exemplary electrophiles include, but are not limited to, activated esters, activated amides, Michael acceptors, alkyl halides, aryl halides, acyl halides, and isothiocyanates.

[0706] Typically, a linker is positioned between, or flanked by, two groups, molecules, or other moieties and connected to each one via a covalent bond, thus connecting the two. In some embodiments, a linker is an amino acid or a plurality of amino acids (e.g., a peptide or protein). In some embodiments, a linker is an organic molecule, group, polymer, or chemical moiety. In some embodiments, a linker is 2-100 amino acids in length, for example, 2, 3, 4, 5, 6, 7, 8, 9, 10, 11, 12, 13, 14, 15, 16, 17, 18, 19, 20, 21, 22, 23, 24, 25, 26, 27, 28, 29, 30, 30-35, 35-40, 40-45, 45-50, 50-60, 60-70, 70-80, 80-90, 90-100, 100-150, or 150-200 amino acids in length. In some embodiments, the linker is about 3 to about 104 (e.g., 5, 6, 7, 8, 9, 10, 11, 12, 13, 14, 15, 16, 17, 18, 19, 20, 21, 22, 23, 24, 25, 26, 27, 28, 29, 30, 31, 32, 33, 34, 35, 36, 37, 38, 39, 40, 41, 42, 43, 44, 45, 46, 47, 48, 49, 50, 55, 60, 65, 70, 75, 80, 85, 90, 95, or 100) amino acids in length. Longer or shorter linkers are also contemplated.

[0707] In some embodiments, any of the fusion proteins provided herein, comprise a adenosine deaminase and a Cas9 domain that are fused to each other via a linker. Various linker lengths and flexibilities between the adenosine deaminase and the Cas9 domain can be employed (e.g., ranging from very flexible linkers of the form (GGGS)n (SEQ ID NO: 246), (GGGGS)n (SEQ ID NO: 247), and (G)n to more rigid linkers of the form (EAAAK)n (SEQ ID NO: 248), (SGGS)n (SEQ ID NO: 355), SGSETPGTSESATPES (SEQ ID NO: 249) (see, e.g., Guilinger JP, et al. Fusion of catalytically inactive Cas9 to FokI nuclease improves the specificity of genome modification. Nat. Biotechnol. 2014; 32(6): 577-82; the entire contents are incorporated herein by reference) and (XP)ₙ) in order to achieve the optimal length for activity for the adenosine deaminase nucleobase editor. In some embodiments, n is 1, 2, 3, 4, 5, 6, 7, 8, 9, 10, 11, 12, 13, 14, or 15. In some embodiments, the linker comprises a (GGS)n motif, wherein n is 1, 3, or 7. In some embodiments, adenosine deaminase and the Cas9 domain of any of the fusion proteins provided herein are fused via a linker comprising the amino acid sequence SGSETPGTSESATPES, which can also be referred to as the XTEN linker. In some embodiments, a linker comprises a plurality of proline residues and is 5-21, 5-14, 5-9, 5-7 amino acids in length, e.g., PAPAP (SEQ ID NO: 363), PAPAPA (SEQ ID NO: 364), PAPAPAP (SEQ ID NO: 365), PAPAPAPA (SEQ ID NO: 366), P(AP)4 (SEQ ID NO: 367), P(AP)7 (SEQ ID NO: 368), P(AP)10 (SEQ ID NO: 369) (see, e.g., Tan J, Zhang F, Karcher D, Bock R. Engineering of high-precision base editors for site-specific single nucleotide replacement. Nat Commun. 2019 Jan. 25; 10(1):439; the entire contents are incorporated herein by reference). Such proline-rich linkers are also termed “rigid” linkers. In some embodiments, adenosine deaminase and the Cas9 domain of any of the fusion proteins provided herein are fused via a linker comprising the amino acid sequence SGSETPGTSESATPES (SEQ ID NO: 249), which can also be referred to as the XTEN linker.

[0708] In some embodiments, the domains of the base editor are fused via a linker that comprises the amino acid sequence of:

(SEQ ID NO: 356)
SGGSSGSETPGTSESATPESSGGS,
(SEQ ID NO: 357)
SGGSSGGSSGSETPGTSESATPESSGGSSGGS,
or
(SEQ ID NO: 358)
GGSGGSPGSPAGSPTSTEEGTSESATPESGPGTSTEPSEGSAPGSPAGSP
TSTEEGTSTEPSEGSAPGTSTEPSEGSAPGTSESATPESGPGSEPATSGG
SGGS.

[0709] In some embodiments, domains of the base editor are fused via a linker comprising the amino acid sequence SGSETPGTSESATPES (SEQ ID NO: 249), which may also be referred to as the XTEN linker. In some embodiments, a linker comprises the amino acid sequence SGGS. In some embodiments, the linker is 24 amino acids in length. In some embodiments, the linker comprises the amino acid sequence SGGSSGGSSGSETPGTSESATPES (SEQ ID NO: 359). In some embodiments, the linker is 40 amino acids in length. In some embodiments, the linker comprises the amino acid sequence:

(SEQ ID NO: 360)
SGGSSGGSSGSETPGTSESATPESSGGSSGGSSGGSSGGS.

In some embodiments, the linker is 64 amino acids in length. In some embodiments, the linker comprises the amino acid sequence: SGGSSGGSSGSETPGTSESATPESSGGSSGGSSGGSSGGSSGSETPGTSESATPESSGGSSG GS (SEQ ID NO: 361). In some embodiments, the linker is 92 amino acids in length. In some embodiments the linker comprises the amino acid sequence:

(SEQ ID NO: 362)
PGSPAGSPTSTEEGTSESATPESGPGTSTEPSEGSAPGSPAGSPTSTEEG
TSTEPSEGSAPGTSTEPSEGSAPGTSESATPESGPGSEPATS.

[0710] In another embodiment, the base editor system comprises a component (protein) that interacts non-covalently with a deaminase (DNA deaminase), e.g., an adenosine, and transiently attracts the adenosine deaminase to the target nucleobase in a target polynucleotide sequence for specific editing, with minimal or reduced bystander or target-adjacent effects. Such a non-covalent system and method involving deaminase-interacting proteins serves to attract a DNA deaminase to a particular genomic target nucleobase and decouples the events of on-target and target-adjacent editing, thus enhancing the achievement of more precise single base substitution mutations. In an embodiment, the deaminase-interacting protein binds to the deaminase (e.g., adenosine deaminase) without blocking or interfering with the active (catalytic) site of the deaminase from engaging the target nucleobase (e.g., adenosine). Such as system, termed “MagnEdit,” involves interacting proteins tethered to a Cas9 and gRNA complex and can attract a co-expressed adenosine (either exogenous or endogenous) to edit a specific genomic target site, and is described in McCann, J. et al., 2020, “MagnEdit—interacting factors that recruit DNA-editing enzymes to single base targets,” Life-Science-Alliance, Vol. 3, No. 4 (e201900606), (doi 10.26508/Isa.201900606), the contents of which are incorporated by reference herein in their entirety. In an embodiment, the DNA deaminase is an adenosine deaminase variant (e.g., TadA*8) as described herein.

[0711] In another embodiment, a system called “Suntag,” involves non-covalently interacting components used for recruiting protein (e.g., adenosine deaminase) components, or multiple copies thereof, of base editors to polynucleotide target sites to achieve base editing at the site with reduced adjacent target editing, for example, as described in Tanenbaum, M. E. et al., “A protein tagging system for signal amplification in gene expression and fluorescence imaging,” Cell. 2014 Oct. 23; 159(3): 635-646. doi:10.1016/j.cell.2014.09.039; and in Huang, Y.-H. et al., 2017, “DNA epigenome editing using CRISPR-Cas SunTag-directed DNMT3A,” Genome Biol 18: 176. doi:10.1186/s13059-017-1306-z, the contents of each of which are incorporated by reference herein in their entirety. In an embodiment, the DNA deaminase is an adenosine deaminase variant (e.g., TadA*8) as described herein.

Nucleic Acid Programmable DNA Binding Proteins with Guide RNAs

[0712] Some aspects of this disclosure provide complexes comprising any of the fusion proteins provided herein, and a guide RNA bound to a nucleic acid programmable DNA binding protein (napDNAbp)domain (e.g., a Cas9 (e.g., a dCas9, a nuclease active Cas9, or a Cas9 nickase)) of the fusion protein. These complexes are also termed ribonucleoproteins (RNPs). In some embodiments, the guide nucleic acid (e.g., guide RNA) is from 15-100 nucleotides long and comprises a sequence of at least 10 contiguous nucleotides that is complementary to a target sequence. In some embodiments, the guide RNA is 15, 16, 17, 18, 19, 20, 21, 22, 23, 24, 25, 26, 27, 28, 29, 30, 31, 32, 33, 34, 35, 36, 37, 38, 39, 40, 41, 42, 43, 44, 45, 46, 47, 48, 49, or 50 nucleotides long. In some embodiments, the guide RNA comprises a sequence of 15, 16, 17, 18, 19, 20, 21, 22, 23, 24, 25, 26, 27, 28, 29, 30, 31, 32, 33, 34, 35, 36, 37, 38, 39, or 40 contiguous nucleotides that is complementary to a target sequence. In some embodiments, the target sequence is a DNA sequence. In some embodiments, the target sequence is an RNA sequence. In some embodiments, the target sequence is a sequence in the genome of a bacteria, yeast, fungi, insect, plant, or animal. In some embodiments, the target sequence is a sequence in the genome of a human. In some embodiments, the 3′ end of the target sequence is immediately adjacent to a canonical PAM sequence (NGG). In some embodiments, the 3′ end of the target sequence is immediately adjacent to a non-canonical PAM sequence (e.g., a sequence listed in Table 2 or 5′-NAA-3′). In some embodiments, the guide nucleic acid (e.g., guide RNA) is complementary to a sequence in a G6PC allele bearing GSD1a targetable mutations.

[0713] Some aspects of this disclosure provide methods of using the fusion proteins, or complexes provided herein. For example, some aspects of this disclosure provide methods comprising contacting a DNA molecule with any of the fusion proteins provided herein, and with at least one guide RNA, wherein the guide RNA is about 15-100 nucleotides long and comprises a sequence of at least 10 contiguous nucleotides that is complementary to a target sequence. In some embodiments, the 3′ end of the target sequence is immediately adjacent to an AGC, GAG, TTT, GTG, or CAA sequence. In some embodiments, the 3′ end of the target sequence is immediately adjacent to an NGA, NGCG, NGN, NNGRRT, NNNRRT, NGCG, NGCN, NGTN, NGTN, NGTN, or 5′ (TTTV) sequence. In some embodiments, the 3′ end of the target sequence is immediately adjacent to an e.g., TTN, DTTN, GTTN, ATTN, ATTC, DTTNT, WTTN, HATY, TTTN, TTTV, TTTC, TG, RTR, or YTN PAM site.

[0714] It will be understood that the numbering of the specific positions or residues in the respective sequences depends on the particular protein and numbering scheme used. Numbering might differ, e.g., in precursors of a mature protein and the mature protein itself, and differences in sequences from species to species may affect numbering. One of skill in the art will be able to identify the respective residue in any homologous protein and in the respective encoding nucleic acid by methods well known in the art, e.g., by sequence alignment and determination of homologous residues.

[0715] It will be apparent to those of skill in the art that in order to target any of the fusion proteins disclosed herein, to a target site, e.g., a site comprising a mutation to be edited, it is typically necessary to co-express the fusion protein together with a guide RNA. As explained in more detail elsewhere herein, a guide RNA typically comprises a tracrRNA framework allowing for napDNAbp (e.g., Cas9) binding, and a guide sequence, which confers sequence specificity to the napDNAbp:nucleic acid editing enzyme/domain fusion protein. Alternatively, the guide RNA and tracrRNA may be provided separately, as two nucleic acid molecules. In some embodiments, the guide RNA comprises a structure, wherein the guide sequence comprises a sequence that is complementary to the target sequence. The guide sequence is typically 20 nucleotides long. The sequences of suitable guide RNAs for targeting napDNAbp:nucleic acid editing enzyme/domain fusion proteins to specific genomic target sites will be apparent to those of skill in the art based on the instant disclosure. Such suitable guide RNA sequences typically comprise guide sequences that are complementary to a nucleic sequence within 50 nucleotides upstream or downstream of the target nucleotide to be edited. Some exemplary guide RNA sequences suitable for targeting any of the provided fusion proteins to specific target sequences are provided herein.

[0716] Distinct portions of sgRNA are predicted to form various features that interact with Cas9 (e.g., SpyCas9) and/or the DNA target. Six conserved modules have been identified within native crRNA:tracrRNA duplexes and single guide RNAs (sgRNAs) that direct Cas9 endonuclease activity (see Briner et al., Guide RNA Functional Modules Direct Cas9 Activity and Orthogonality Mol Cell. 2014 Oct. 23; 56(2):333-339). The six modules include the spacer responsible for DNA targeting, the upper stem, bulge, lower stem formed by the CRISPR repeat:tracrRNA duplex, the nexus, and hairpins from the 3′ end of the tracrRNA. The upper and lower stems interact with Cas9 mainly through sequence-independent interactions with the phosphate backbone. In some embodiments, the upper stem is dispensable. In some embodiments, the conserved uracil nucleotide sequence at the base of the lower stem is dispensable. The bulge participates in specific side-chain interactions with the Rec1 domain of Cas9. The nucleobase of U44 interacts with the side chains of Tyr 325 and His 328, while G43 interacts with Tyr 329. The nexus forms the core of the sgRNA:Cas9 interactions and lies at the intersection between the sgRNA and both Cas9 and the target DNA. The nucleobases of A51 and A52 interact with the side chain of Phe 1105; U56 interacts with Arg 457 and Asn 459; the nucleobase of U59 inserts into a hydrophobic pocket defined by side chains of Arg 74, Asn 77, Pro 475, Leu 455, Phe 446, and Ile 448; C60 interacts with Leu 455, Ala 456, and Asn 459, and C61 interacts with the side chain of Arg 70, which in turn interacts with C15. In some embodiments, one or more of these mutations are made in the bulge and/or the nexus of a sgRNA for a Cas9 (e.g., spyCas9) to optimize sgRNA:Cas9 interactions.

[0717] Moreover, the tracrRNA nexus and hairpins are critical for Cas9 pairing and can be swapped to cross orthogonality barriers separating disparate Cas9 proteins, which is instrumental for further harnessing of orthogonal Cas9 proteins. In some embodiments, the nexus and hairpins are swapped to target orthogonal Cas9 proteins. In some embodiments, a sgRNA is dispensed of the upper stem, hairpin 1, and/or the sequence flexibility of the lower stem to design a guide RNA that is more compact and conformationally stable. In some embodiments, the modules are modified to optimize multiplex editing using a single Cas9 with various chimeric guides or by concurrently using orthogonal systems with different combinations of chimeric sgRNAs. Details regarding guide functional modules and methods thereof are described, for example, in Briner et al., Guide RNA Functional Modules Direct Cas9 Activity and Orthogonality Mol Cell. 2014 Oct. 23; 56(2):333-339, the contents of which is incorporated by reference herein in its entirety. The domains of the base editor disclosed herein can be arranged in any order. Non-limiting examples of a base editor comprising a fusion protein comprising e.g., a polynucleotide-programmable nucleotide-binding domain (e.g., Cas9) and a deaminase domain (e.g., adenosine deaminase) can be arranged as follows:
[0718] NH₂-[nucleobase editing domain]-Linker1-[nucleobase editing domain]-COOH;
[0719] NH₂-[deaminase]-Linker1-[nucleobase editing domain]-COOH;
[0720] NH₂-[deaminase]-Linker1-[nucleobase editing domain]-Linker2-[UGI]-COOH;
[0721] NH₂-[deaminase]-Linker1-[nucleobase editing domain]-COOH;
[0722] NH₂-[adenosine deaminase]-Linker1-[nucleobase editing domain]-COOH;
[0723] NH₂-[nucleobase editing domain]-[deaminase]-COOH;
[0724] NH₂-[deaminase]-[nucleobase editing domain]-[inosine BER inhibitor]-COOH;
[0725] NH₂-[deaminase]-[inosine BER inhibitor]-[nucleobase editing domain]-COOH;
[0726] NH₂-[inosine BER inhibitor]-[deaminase]-[nucleobase editing domain]-COOH;
[0727] NH₂-[nucleobase editing domain]-[deaminase]-[inosine BER inhibitor]-COOH;
[0728] NH₂-[nucleobase editing domain]-[inosine BER inhibitor]-[deaminase]-COOH;
[0729] NH₂-[inosine BER inhibitor]-[nucleobase editing domain]-[deaminase]-COOH;
[0730] NH2-[nucleobase editing domain]-Linker1-[deaminase]-Linker2-[nucleobase editing domain]-COOH;
[0731] NH2-[nucleobase editing domain]-Linker1-[deaminase]-[nucleobase editing domain]-COOH;
[0732] NH2-[nucleobase editing domain]-[deaminase]-Linker2-[nucleobase editing domain]-COOH;
[0733] NH2-[nucleobase editing domain]-[deaminase]-[nucleobase editing domain]-COOH;
[0734] NH2-[nucleobase editing domain]-Linker1-[deaminase]-Linker2-[nucleobase editing domain]-[inosine BER inhibitor]-COOH;
[0735] NH2-[nucleobase editing domain]-Linker1-[deaminase]-[nucleobase editing domain]-[inosine BER inhibitor]-COOH;
[0736] NH2-[nucleobase editing domain]-[deaminase]-Linker2-[nucleobase editing domain]-[inosine BER inhibitor]-COOH;
[0737] NH2-[nucleobase editing domain]-[deaminase]-[nucleobase editing domain]-[inosine BER inhibitor]-COOH;
[0738] NH2-[inosine BER inhibitor]-[nucleobase editing domain]-Linker1-[deaminase]-Linker2-[nucleobase editing domain]-COOH;
[0739] NH2-[inosine BER inhibitor]-[nucleobase editing domain]-Linker1-[deaminase]-[nucleobase editing domain]-COOH;
[0740] NH2-[inosine BER inhibitor]-[nucleobase editing domain]-[deaminase]-Linker2-[nucleobase editing domain]-COOH; or
[0741] NH2-[inosine BER inhibitor]NH2-[nucleobase editing domain]-[deaminase]-[nucleobase editing domain]-COOH.

[0742] In some embodiments, the base editing fusion proteins provided herein need to be positioned at a precise location, for example, where a target base is placed within a defined region (e.g., a “deamination window”). In some embodiments, a target can be within a 4-base region. In some embodiments, such a defined target region can be approximately 15 bases upstream of the PAM. See Komor, A. C., et al., “Programmable editing of a target base in genomic DNA without double-stranded DNA cleavage” Nature 533, 420-424 (2016); Gaudelli, N. M., et al., “Programmable base editing of A·T to G·C in genomic DNA without DNA cleavage” Nature 551, 464-471 (2017); and Komor, A. C., et al., “Improved base excision repair inhibition and bacteriophage Mu Gam protein yields C:G-to-T:A base editors with higher efficiency and product purity” Science Advances 3:eaao4774 (2017), the entire contents of which are hereby incorporated by reference.

[0743] A defined target region can be a deamination window. A deamination window can be the defined region in which a base editor acts upon and deaminates a target nucleotide. In some embodiments, the deamination window is within a 2, 3, 4, 5, 6, 7, 8, 9, or 10 base regions. In some embodiments, the deamination window is 5, 6, 7, 8, 9, 10, 11, 12, 13, 14, 15, 16, 17, 18, 19, 20, 21, 22, 23, 24, or 25 bases upstream of the PAM.

[0744] The base editors of the present disclosure can comprise any domain, feature or amino acid sequence which facilitates the editing of a target polynucleotide sequence. For example, in some embodiments, the base editor comprises a nuclear localization sequence (NLS). In some embodiments, an NLS of the base editor is localized between a deaminase domain and a napDNAbp domain. In some embodiments, an NLS of the base editor is localized C-terminal to a napDNAbp domain.

[0745] Non-limiting examples of protein domains which can be included in the fusion protein include a deaminase domain (e.g., adenosine deaminase), a uracil glycosylase inhibitor (UGI) domain, epitope tags, reporter gene sequences, and/or protein domains having one or more of the following activities: methylase activity, demethylase activity, transcription activation activity, transcription repression activity, transcription release factor activity, gene silencing activity, chromatin modifying activity, epigenetic modifying activity, histone modification activity, RNA cleavage activity, and nucleic acid binding activity. Additional domains can be a heterologous functional domain. Such heterologous functional domains can confer a function activity, such as modification of a target polypeptide associated with target DNA (e.g., a histone, a DNA binding protein, etc.), leading to, for example, histone methylation, histone acetylation, histone ubiquitination, and the like. Other functions and/or activities conferred can include transposase activity, integrase activity, recombinase activity, ligase activity, ubiquitin ligase activity, deubiquitinating activity, adenylation activity, deadenylation activity, SUMOylation activity, deSUMOylation activity, or any combination of the above.

[0746] Other functions conferred can include methyltransferase activity, demethylase activity, deamination activity, dismutase activity, alkylation activity, depurination activity, oxidation activity, pyrimidine dimer forming activity, integrase activity, transposase activity, recombinase activity, polymerase activity, ligase activity, helicase activity, photolyase activity or glycosylase activity, acetyltransferase activity, deacetylase activity, kinase activity, phosphatase activity, ubiquitin ligase activity, deubiquitinating activity, adenylation activity, deadenylation activity, SUMOylating activity, deSUMOylating activity, ribosylation activity, deribosylation activity, myristoylation activity, remodeling activity, protease activity, oxidoreductase activity, transferase activity, hydrolase activity, lyase activity, isomerase activity, synthase activity, synthetase activity, and demyristoylation activity, or any combination thereof.

[0747] A domain may be detected or labeled with an epitope tag, a reporter protein, other binding domains. Non-limiting examples of epitope tags include histidine (His) tags, V5 tags, FLAG tags, influenza hemagglutinin (HA) tags, Myc tags, VSV-G tags, and thioredoxin (Trx) tags. Examples of reporter genes include, but are not limited to, glutathione-5-transferase (GST), horseradish peroxidase (HRP), chloramphenicol acetyltransferase (CAT) beta-galactosidase, beta-glucuronidase, luciferase, green fluorescent protein (GFP), HcRed, DsRed, cyan fluorescent protein (CFP), yellow fluorescent protein (YFP), and autofluorescent proteins including blue fluorescent protein (BFP). Additional protein sequences can include amino acid sequences that bind DNA molecules or bind other cellular molecules, including but not limited to maltose binding protein (MBP), S-tag, Lex A DNA binding domain (DBD) fusions, GAL4 DNA binding domain fusions, and herpes simplex virus (HSV) BP16 protein fusions.

### Methods of Using Fusion Proteins Comprising Adenosine Deaminase and a Cas9 Domain

[0748] Some aspects of this disclosure provide methods of using the fusion proteins, or complexes provided herein. For example, some aspects of this disclosure provide methods comprising contacting a DNA molecule with any of the fusion proteins provided herein, and with at least one guide RNA, wherein the guide RNA is about 15-100 nucleotides long and comprises a sequence of at least 10 contiguous nucleotides that is complementary to a target sequence. In some embodiments, the 3′ end of the target sequence is immediately adjacent to a canonical PAM sequence (NGG). In some embodiments, the 3′ end of the target sequence is not immediately adjacent to a canonical PAM sequence (NGG). In some embodiments, the 3′ end of the target sequence is immediately adjacent to an AGC, GAG, TTT, GTG, or CAA sequence. In some embodiments, the 3′ end of the target sequence is immediately adjacent to an NGA, NGCG, NGN, NNGRRT, NNNRRT, NGCG, NGCN, NGTN, NGTN, NGTN, or 5′ (TTTV) sequence.

### Base Editor Efficiency

[0749] In some embodiments, the nucleobase editing proteins provided herein can be validated for gene editing-based human therapeutics in vitro. It will be understood by the skilled artisan that the nucleobase editing proteins provided herein, e.g., the fusion proteins comprising a polynucleotide programmable nucleotide binding domain (e.g., Cas9) and a nucleobase editing domain (e.g., an adenosine deaminase domain) can be used to edit a nucleotide from A to G or C to T.

[0750] As most of the known genetic variations associated with human disease are point mutations, methods that can more efficiently and cleanly make precise point mutations are needed. Base editing systems as provided herein provide a new way to provide genome editing without generating double-strand DNA breaks, without requiring a donor DNA template, and without inducing an excess of stochastic insertions and deletions.

[0751] In some embodiments, the present disclosure provides base editors that efficiently generate an intended mutation in a polynucleotide sequence without generating a significant number of unintended mutations, such as unintended point mutations. In some embodiments, an intended mutation is a mutation that is generated by a specific base editor (e.g., adenosine base editor) bound to a guide polynucleotide (e.g., gRNA), specifically designed to generate the intended mutation. In some embodiments, the intended mutation is in a gene associated with a target antigen associated with a disease or disorder, e.g., a mutation in the G6PC gene associated with GSD1a. In some embodiments, the intended mutation is an adenine (A) to guanine (G) point mutation (e.g., SNP) in a gene associated with a target antigen associated with a disease or disorder, e.g., a mutation in the G6PC gene associated with GSD1a. In some embodiments, the intended mutation is an adenine (A) to guanine (G) point mutation within the coding region or non-coding region of a gene (e.g., regulatory region or element).

[0752] The base editors as described herein advantageously modify a specific nucleotide base encoding a protein without generating a significant proportion of indels. An “indel”, as used herein, refers to the insertion or deletion of a nucleotide base within a nucleic acid. Such insertions or deletions can lead to frame shift mutations within a coding region of a gene. In some embodiments, it is desirable to generate base editors that efficiently modify (e.g. mutate) a specific nucleotide within a nucleic acid, without generating a large number of insertions or deletions (i.e., indels) in the nucleic acid. In some embodiments, it is desirable to generate base editors that efficiently modify (e.g. mutate or methylate) a specific nucleotide within a nucleic acid, without generating a large number of insertions or deletions (i.e., indels) in the nucleic acid. In certain embodiments, any of the base editors provided herein can generate a greater proportion of intended modifications (e.g., methylations) versus indels. In certain embodiments, any of the base editors provided herein can generate a greater proportion of intended modifications (e.g., mutations) versus indels.

[0753] In some embodiments, the base editors provided herein are capable of generating a ratio of intended mutations to indels (i.e., intended point mutations:unintended point mutations) that is greater than 1:1. In some embodiments, the base editors provided herein are capable of generating a ratio of intended mutations to indels that is at least 1.5:1, at least 2:1, at least 2.5:1, at least 3:1, at least 3.5:1, at least 4:1, at least 4.5:1, at least 5:1, at least 5.5:1, at least 6:1, at least 6.5:1, at least 7:1, at least 7.5:1, at least 8:1, at least 10:1, at least 12:1, at least 15:1, at least 20:1, at least 25:1, at least 30:1, at least 40:1, at least 50:1, at least 100:1, at least 200:1, at least 300:1, at least 400:1, at least 500:1, at least 600:1, at least 700:1, at least 800:1, at least 900:1, or at least 1000:1, or more. The number of intended mutations and indels may be determined using any suitable method.

[0754] In some embodiments, the base editors provided herein can limit formation of indels in a region of a nucleic acid. In some embodiments, the region is at a nucleotide targeted by a base editor or a region within 2, 3, 4, 5, 6, 7, 8, 9, or 10 nucleotides of a nucleotide targeted by a base editor. In some embodiments, any of the base editors provided herein can limit the formation of indels at a region of a nucleic acid to less than 1%, less than 1.5%, less than 2%, less than 2.5%, less than 3%, less than 3.5%, less than 4%, less than 4.5%, less than 5%, less than 6%, less than 7%, less than 8%, less than 9%, less than 10%, less than 12%, less than 15%, or less than 20%. The number of indels formed at a nucleic acid region may depend on the amount of time a nucleic acid (e.g., a nucleic acid within the genome of a cell) is exposed to a base editor. In some embodiments, a number or proportion of indels is determined after at least 1 hour, at least 2 hours, at least 6 hours, at least 12 hours, at least 24 hours, at least 36 hours, at least 48 hours, at least 3 days, at least 4 days, at least 5 days, at least 7 days, at least 10 days, or at least 14 days of exposing a nucleic acid (e.g., a nucleic acid within the genome of a cell) to a base editor.

[0755] Some aspects of the disclosure are based on the recognition that any of the base editors provided herein are capable of efficiently generating an intended mutation in a nucleic acid (e.g. a nucleic acid within a genome of a subject) without generating a considerable number of unintended mutations (e.g., spurious off-target editing or bystander editing). In some embodiments, an intended mutation is a mutation that is generated by a specific base editor bound to a gRNA, specifically designed to generate the intended mutation. In some embodiments, the intended mutation is a mutation that generates a stop codon, for example, a premature stop codon within the coding region of a gene. In some embodiments, the intended mutation is a mutation that eliminates a stop codon. In some embodiments, the intended mutation is a mutation that alters the splicing of a gene. In some embodiments, the intended mutation is a mutation that alters the regulatory sequence of a gene (e.g., a gene promotor or gene repressor).

[0756] In some embodiments, any of the base editors provided herein are capable of generating a ratio of intended mutations to unintended mutations (e.g., intended mutations:unintended mutations) that is greater than 1:1. In some embodiments, any of the base editors provided herein are capable of generating a ratio of intended mutations to unintended mutations that is at least 1.5:1, at least 2:1, at least 2.5:1, at least 3:1, at least 3.5:1, at least 4:1, at least 4.5:1, at least 5:1, at least 5.5:1, at least 6:1, at least 6.5:1, at least 7:1, at least 7.5:1, at least 8:1, at least 10:1, at least 12:1, at least 15:1, at least 20:1, at least 25:1, at least 30:1, at least 40:1, at least 50:1, at least 100:1, at least 150:1, at least 200:1, at least 250:1, at least 500:1, or at least 1000:1, or more. It should be appreciated that the characteristics of the base editors described herein, may be applied to any of the fusion proteins, or methods of using the fusion proteins provided herein.

[0757] Base editing is often referred to as a “modification”, such as, a genetic modification, a gene modification and modification of the nucleic acid sequence and is clearly understandable based on the context that the modification is a base editing modification. A base editing modification is therefore a modification at the nucleotide base level, for example as a result of the deaminase activity discussed throughout the disclosure, which then results in a change in the gene sequence, and may affect the gene product. In essence therefore, the gene editing modification described herein may result in a modification of the gene, structurally and/or functionally, wherein the expression of the gene product may be modified, for example, the expression of the gene is knocked out; or conversely, enhanced, or, in some circumstances, the gene function or activity may be modified. Using the methods disclosed herein, a base editing efficiency may be determined as the knockdown efficiency of the gene in which the base editing is performed, wherein the base editing is intended to knockdown the expression of the gene. A knockdown level may be validated quantitatively by determining the expression level by any detection assay, such as assay for protein expression level, for example, by flow cytometry; assay for detecting RNA expression such as quantitative RT-PCR, northern blot analysis, or any other suitable assay such as pyrosequencing; and may be validated qualitatively by nucleotide sequencing reactions.

[0758] In some embodiments, any of base editor systems provided herein result in less than 50%, less than 40%, less than 30%, less than 20%, less than 19%, less than 18%, less than 17%, less than 16%, less than 15%, less than 14%, less than 13%, less than 12%, less than 11%, less than 10%, less than 9%, less than 8%, less than 7%, less than 6%, less than 5%, less than 4%, less than 3%, less than 2%, less than 1%, less than 0.9%, less than 0.8%, less than 0.7%, less than 0.6%, less than 0.5%, less than 0.4%, less than 0.3%, less than 0.2%, less than 0.1%, less than 0.09%, less than 0.08%, less than 0.07%, less than 0.06%, less than 0.05%, less than 0.04%, less than 0.03%, less than 0.02%, or less than 0.01% indel formation in the target polynucleotide sequence.

[0759] In some embodiments, targeted modifications, e.g., single base editing, are used simultaneously to target at least 4, 5, 6, 7, 8, 9, 10, 11, 12 13, 14, 15, 16, 17, 18, 19, 20, 21, 22, 23, 24, 25, 26, 27, 28, 29, 30, 31, 32, 33, 34, 35, 36, 37, 38, 39, 40, 41, 42, 43, 44, 45, 46, 47, 48, 49 or 50 different endogenous sequences for base editing with different guide RNAs.

[0760] In some embodiments, targeted modifications, e.g. single base editing, are used to sequentially target at least 4, 5, 6, 7, 8, 9, 10, 11, 12 13, 14, 15, 16, 17, 18, 19, 20, 21, 22, 23, 24, 25, 26, 27, 28, 29, 30, 31, 32, 33, 34, 35, 36, 37, 38, 39, 40, 41, 42, 43, 44, 45, 46, 47, 48, 49 50, or more different endogenous gene sequences for base editing with different guide RNAs.

[0761] Some aspects of the disclosure are based on the recognition that any of the base editors provided herein are capable of efficiently generating an intended mutation, such as a point mutation, in a nucleic acid (e.g., a nucleic acid within a genome of a subject) without generating a significant number of unintended mutations, such as unintended point mutations (i.e., mutation of bystanders). In some embodiments, any of the base editors provided herein are capable of generating at least 0.01% of intended mutations (i.e., at least 0.01% base editing efficiency). In some embodiments, any of the base editors provided herein are capable of generating at least 0.01%, 1%, 2%, 3%, 4%, 5%, 10%, 15%, 20%, 25%, 30%, 40%, 45%, 50%, 60%, 70%, 80%, 90%, 95%, or 99% of intended mutations.

[0762] In some embodiments, any of base editor systems comprising one of the ABE base editor variants described herein result in less than 50%, less than 40%, less than 30%, less than 20%, less than 19%, less than 18%, less than 17%, less than 16%, less than 15%, less than 14%, less than 13%, less than 12%, less than 11%, less than 10%, less than 9%, less than 8%, less than 7%, less than 6%, less than 5%, less than 4%, less than 3%, less than 2%, less than 1%, less than 0.9%, less than 0.8%, less than 0.7%, less than 0.6%, less than 0.5%, less than 0.4%, less than 0.3%, less than 0.2%, less than 0.1%, less than 0.09%, less than 0.08%, less than 0.07%, less than 0.06%, less than 0.05%, less than 0.04%, less than 0.03%, less than 0.02%, or less than 0.01% indel formation in the target polynucleotide sequence. In some embodiments, any of base editor systems comprising one of the ABE base editor variants described herein result in less than 0.8% indel formation in the target polynucleotide sequence. In some embodiments, any of base editor systems comprising one of the ABE base editor variants described herein result in at most 0.8% indel formation in the target polynucleotide sequence. In some embodiments, any of base editor systems comprising one of the ABE base editor variants described herein result in less than 0.3% indel formation in the target polynucleotide sequence. In some embodiments, any of base editor systems comprising one of the ABE base editor variants described results in lower indel formation in the target polynucleotide sequence compared to a base editor system comprising one of ABE7 base editors. In some embodiments, any of base editor systems comprising one of the ABE base editor variants described herein results in lower indel formation in the target polynucleotide sequence compared to a base editor system comprising an ABE7.10.

[0763] In some embodiments, any of base editor systems comprising one of the ABE base editor variants described herein has reduction in indel frequency compared to a base editor system comprising one of the ABE7 base editors. In some embodiments, any of base editor systems comprising one of the ABE base editor variants described herein has at least 0.01%, at least 1%, at least 2%, at least 3%, at least 4%, at least 5%, at least 10%, at least 15%, at least 20%, at least 25%, at least 30%, at least 35%, at least 40%, at least 45%, at least 50%, at least 55%, at least 60%, at least 65%, at least 70%, at least 75%, at least 80%, at least 85%, at least 90%, or at least 95% reduction in indel frequency compared to a base editor system comprising one of the ABE7 base editors. In some embodiments, a base editor system comprising one of the ABE base editor variants described herein has at least 0.01%, at least 1%, at least 2%, at least 3%, at least 4%, at least 5%, at least 10%, at least 15%, at least 20%, at least 25%, at least 30%, at least 35%, at least 40%, at least 45%, at least 50%, at least 55%, at least 60%, at least 65%, at least 70%, at least 75%, at least 80%, at least 85%, at least 90%, or at least 95% reduction in indel frequency compared to a base editor system comprising an ABE7.10.

[0764] Provided herein are adenosine deaminase variants (e.g., TadA variants) that have increased efficiency and specificity. In particular, the adenosine deaminase variants described herein are more likely to edit a desired base within a polynucleotide, and are less likely to edit bases that are not intended to be altered (e.g., “bystanders”).

[0765] In some embodiments, any of the base editing system comprising one of the ABE base editor variants described herein has reduced bystander editing or mutations. In some embodiments, an unintended editing or mutation is a bystander mutation or bystander editing, for example, base editing of a target base (e.g., A or C) in an unintended or non-target position in a target window of a target nucleotide sequence. In some embodiments, any of the base editing system comprising one of the ABE base editor variants described herein has reduced bystander editing or mutations compared to a base editor system comprising an ABE7 base editor, e.g., ABE7.10. In some embodiments, any of the base editing system comprising one of the ABE base editor variants described herein has reduced bystander editing or mutations by at least 1%, at least 2%, at least 3%, at least 4%, at least 5%, at least 10%, at least 15%, at least 20%, at least 25%, at least 30%, at least 35%, at least 40%, at least 45%, at least 50%, at least 55%, at least 60%, at least 65%, at least 70%, at least 75%, at least 80%, at least 85%, at least 90%, at least 95%, or at least 99% compared to a base editor system comprising an ABE7 base editor, e.g., ABE7.10. In some embodiments, any of the base editing system comprising one of the ABE base editor variants described herein has reduced bystander editing or mutations by at least 1.1 fold, at least 1.2 fold, at least 1.3 fold, at least 1.4 fold, at least 1.5 fold, at least 1.6 fold, at least 1.7 fold, at least 1.8 fold, at least 1.9 fold, at least 2.0 fold, at least 2.1 fold, at least 2.2 fold, at least 2.3 fold, at least 2.4 fold, at least 2.5 fold, at least 2.6 fold, at least 2.7 fold, at least 2.8 fold, at least 2.9 fold, or at least 3.0 fold compared to a base editor system comprising an ABE7 base editor, e.g., ABE7.10.

[0766] In some embodiments, any of the base editing system comprising one of the ABE base editor variants described herein has reduced spurious editing. In some embodiments, an unintended editing or mutation is a spurious mutation or spurious editing, for example, non-specific editing or guide independent editing of a target base (e.g., A or C) in an unintended or non-target region of the genome. In some embodiments, any of the base editing system comprising one of the ABE base editor variants described herein has reduced spurious editing compared to a base editor system comprising an ABE7 base editor, e.g., ABE7.10. In some embodiments, any of the base editing system comprising one of the ABE base editor variants described herein has reduced spurious editing by at least 1%, at least 2%, at least 3%, at least 4%, at least 5%, at least 10%, at least 15%, at least 20%, at least 25%, at least 30%, at least 35%, at least 40%, at least 45%, at least 50%, at least 55%, at least 60%, at least 65%, at least 70%, at least 75%, at least 80%, at least 85%, at least 90%, at least 95%, or at least 99% compared to a base editor system comprising an ABE7 base editor, e.g., ABE7.10. In some embodiments, any of the base editing system comprising one of the ABE base editor variants described herein has reduced spurious editing by at least 1.1 fold, at least 1.2 fold, at least 1.3 fold, at least 1.4 fold, at least 1.5 fold, at least 1.6 fold, at least 1.7 fold, at least 1.8 fold, at least 1.9 fold, at least 2.0 fold, at least 2.1 fold, at least 2.2 fold, at least 2.3 fold, at least 2.4 fold, at least 2.5 fold, at least 2.6 fold, at least 2.7 fold, at least 2.8 fold, at least 2.9 fold, or at least 3.0 fold compared to a base editor system comprising an ABE7 base editor, e.g., ABE7.10.

[0767] In some embodiments, any of the ABE base editor variants described herein have at least 0.01%, at least 1%, at least 2%, at least 3%, at least 4%, at least 5%, at least 10%, at least 15%, at least 20%, at least 25%, at least 30%, at least 35%, at least 40%, at least 45%, at least 50%, at least 55%, at least 60%, at least 65%, at least 70%, at least 75%, at least 80%, at least 85%, at least 90%, at least 95%, or at least 99% base editing efficiency. In some embodiments, the base editing efficiency may be measured by calculating the percentage of edited nucleobases in a population of cells. In some embodiments, any of the ABE base editor variants described herein have base editing efficiency of at least 0.01%, at least 1%, at least 2%, at least 3%, at least 4%, at least 5%, at least 10%, at least 15%, at least 20%, at least 25%, at least 30%, at least 35%, at least 40%, at least 45%, at least 50%, at least 55%, at least 60%, at least 65%, at least 70%, at least 75%, at least 80%, at least 85%, at least 90%, at least 95%, or at least 99% as measured by edited nucleobases in a population of cells.

[0768] In some embodiments, any of the ABE base editor variants described herein has higher base editing efficiency compared to the ABE7 base editors. In some embodiments, any of the ABE base editor variants described herein have at least 1%, at least 2%, at least 3%, at least 4%, at least 5%, at least 10%, at least 15%, at least 20%, at least 25%, at least 30%, at least 35%, at least 40%, at least 45%, at least 50%, at least 55%, at least 60%, at least 65%, at least 70%, at least 75%, at least 80%, at least 85%, at least 90%, at least 95%, at least 99%, at least 100%, at least 105%, at least 110%, at least 115%, at least 120%, at least 125%, at least 130%, at least 135%, at least 140%, at least 145%, at least 150%, at least 155%, at least 160%, at least 165%, at least 170%, at least 175%, at least 180%, at least 185%, at least 190%, at least 195%, at least 200%, at least 210%, at least 220%, at least 230%, at least 240%, at least 250%, at least 260%, at least 270%, at least 280%, at least 290%, at least 300%, at least 310%, at least 320%, at least 330%, at least 340%, at least 350%, at least 360%, at least 370%, at least 380%, at least 390%, at least 400%, at least 450%, or at least 500% higher base editing efficiency compared to an ABE7 base editor, e.g., ABE7.10.

[0769] In some embodiments, any of the ABE base editor variants described herein has at least 1.1 fold, at least 1.2 fold, at least 1.3 fold, at least 1.4 fold, at least 1.5 fold, at least 1.6 fold, at least 1.7 fold, at least 1.8 fold, at least 1.9 fold, at least 2.0 fold, at least 2.1 fold, at least 2.2 fold, at least 2.3 fold, at least 2.4 fold, at least 2.5 fold, at least 2.6 fold, at least 2.7 fold, at least 2.8 fold, at least 2.9 fold, at least 3.0 fold, at least 3.1 fold, at least 3.2, at least 3.3 fold, at least 3.4 fold, at least 3.5 fold, at least 3.6 fold, at least 3.7 fold, at least 3.8 fold, at least 3.9 fold, at least 4.0 fold, at least 4.1 fold, at least 4.2 fold, at least 4.3 fold, at least 4.4 fold, at least 4.5 fold, at least 4.6 fold, at least 4.7 fold, at least 4.8 fold, at least 4.9 fold, or at least 5.0 fold higher base editing efficiency compared to an ABE7 base editor, e.g., ABE7.10.

[0770] In some embodiments, any of the ABE base editor variants described herein have at least 0.01%, at least 1%, at least 2%, at least 3%, at least 4%, at least 5%, at least 10%, at least 15%, at least 20%, at least 25%, at least 30%, at least 35%, at least 40%, at least 45%, at least 50%, at least 55%, at least 60%, at least 65%, at least 70%, at least 75%, at least 80%, at least 85%, at least 90%, at least 95%, or at least 99% on-target base editing efficiency. In some embodiments, any of the ABE base editor variants described herein have on-target base editing efficiency of at least 0.01%, at least 1%, at least 2%, at least 3%, at least 4%, at least 5%, at least 10%, at least 15%, at least 20%, at least 25%, at least 30%, at least 35%, at least 40%, at least 45%, at least 50%, at least 55%, at least 60%, at least 65%, at least 70%, at least 75%, at least 80%, at least 85%, at least 90%, at least 95%, or at least 99% as measured by edited target nucleobases in a population of cells.

[0771] In some embodiments, any of the ABE base editor variants described herein has higher on-target base editing efficiency compared to the ABE7 base editors. In some embodiments, any of the ABE base editor variants described herein have at least 1%, at least 2%, at least 3%, at least 4%, at least 5%, at least 10%, at least 15%, at least 20%, at least 25%, at least 30%, at least 35%, at least 40%, at least 45%, at least 50%, at least 55%, at least 60%, at least 65%, at least 70%, at least 75%, at least 80%, at least 85%, at least 90%, at least 95%, at least 99%, at least 100%, at least 105%, at least 110%, at least 115%, at least 120%, at least 125%, at least 130%, at least 135%, at least 140%, at least 145%, at least 150%, at least 155%, at least 160%, at least 165%, at least 170%, at least 175%, at least 180%, at least 185%, at least 190%, at least 195%, at least 200%, at least 210%, at least 220%, at least 230%, at least 240%, at least 250%, at least 260%, at least 270%, at least 280%, at least 290%, at least 300%, at least 310%, at least 320%, at least 330%, at least 340%, at least 350%, at least 360%, at least 370%, at least 380%, at least 390%, at least 400%, at least 450%, or at least 500% higher on-target base editing efficiency compared to an ABE7 base editor, e.g., ABE7.10.

[0772] In some embodiments, any of the ABE base editor variants described herein has at least 1.1 fold, at least 1.2 fold, at least 1.3 fold, at least 1.4 fold, at least 1.5 fold, at least 1.6 fold, at least 1.7 fold, at least 1.8 fold, at least 1.9 fold, at least 2.0 fold, at least 2.1 fold, at least 2.2 fold, at least 2.3 fold, at least 2.4 fold, at least 2.5 fold, at least 2.6 fold, at least 2.7 fold, at least 2.8 fold, at least 2.9 fold, at least 3.0 fold, at least 3.1 fold, at least 3.2 fold, at least 3.3 fold, at least 3.4 fold, at least 3.5 fold, at least 3.6 fold, at least 3.7 fold, at least 3.8 fold, at least 3.9 fold, at least 4.0 fold, at least 4.1 fold, at least 4.2 fold, at least 4.3 fold, at least 4.4 fold, at least 4.5 fold, at least 4.6 fold, at least 4.7 fold, at least 4.8 fold, at least 4.9 fold, or at least 5.0 fold higher on-target base editing efficiency compared to an ABE7 base editor, e.g., ABE7.10.

[0773] The ABE base editor variants described herein may be delivered to a host cell via a plasmid, a vector, a LNP complex, or an mRNA. In some embodiments, any of the ABE base editor variants described herein is delivered to a host cell as an mRNA. In some embodiments, an ABE base editor delivered via a nucleic acid based delivery system, e.g., an mRNA, has on-target editing efficiency of at least at least 1%, at least 2%, at least 3%, at least 4%, at least 5%, at least 10%, at least 15%, at least 20%, at least 25%, at least 30%, at least 35%, at least 40%, at least 45%, at least 50%, at least 55%, at least 60%, at least 65%, at least 70%, at least 75%, at least 80%, at least 85%, at least 90%, at least 95%, or at least 99% as measured by edited nucleobases. In some embodiments, an ABE base editor delivered by an mRNA system has higher base editing efficiency compared to an ABE base editor delivered by a plasmid or vector system. In some embodiments, any of the ABE base editor variants described herein has at least 1%, at least 2%, at least 3%, at least 4%, at least 5%, at least 10%, at least 15%, at least 20%, at least 25%, at least 30%, at least 35%, at least 40%, at least 45%, at least 50%, at least 55%, at least 60%, at least 65%, at least 70%, at least 75%, at least 80%, at least 85%, at least 90%, at least 95%, at least 99%, at least 100%, at least 105%, at least 110%, at least 115%, at least 120%, at least 125%, at least 130%, at least 135%, at least 140%, at least 145%, at least 150%, at least 155%, at least 160%, at least 165%, at least 170%, at least 175%, at least 180%, at least 185%, at least 190%, at least 195%, at least 200%, at least 210%, at least 220%, at least 230%, at least 240%, at least 250%, at least 260%, at least 270%, at least 280%, at least 290%, at least 300% higher, at least 310%, at least 320%, at least 330%, at least 340%, at least 350%, at least 360%, at least 370%, at least 380%, at least 390%, at least 400%, at least 450%, or at least 500% on-target editing efficiency when delivered by an mRNA system compared to when delivered by a plasmid or vector system. In some embodiments, any of the ABE base editor variants described herein has at least 1.1 fold, at least 1.2 fold, at least 1.3 fold, at least 1.4 fold, at least 1.5 fold, at least 1.6 fold, at least 1.7 fold, at least 1.8 fold, at least 1.9 fold, at least 2.0 fold, at least 2.1 fold, at least 2.2 fold, at least 2.3 fold, at least 2.4 fold, at least 2.5 fold, at least 2.6 fold, at least 2.7 fold, at least 2.8 fold, at least 2.9 fold, at least 3.0 fold, at least 3.1 fold, at least 3.2 fold, at least 3.3 fold, at least 3.4 fold, at least 3.5 fold, at least 3.6 fold, at least 3.7 fold, at least 3.8 fold, at least 3.9 fold, at least 4.0 fold, at least 4.1 fold, at least 4.2 fold, at least 4.3 fold, at least 4.4 fold, at least 4.5 fold, at least 4.6 fold, at least 4.7 fold, at least 4.8 fold, at least 4.9 fold, or at least 5.0 fold higher on-target editing efficiency when delivered by an mRNA system compared to when delivered by a plasmid or vector system.

[0774] In some embodiments, any of base editor systems comprising one of the ABE base editor variants described herein result in less than 50%, less than 40%, less than 30%, less than 20%, less than 19%, less than 18%, less than 17%, less than 16%, less than 15%, less than 14%, less than 13%, less than 12%, less than 11%, less than 10%, less than 9%, less than 8%, less than 7%, less than 6%, less than 5%, less than 4%, less than 3%, less than 2%, less than 1%, less than 0.9%, less than 0.8%, less than 0.7%, less than 0.6%, less than 0.5%, less than 0.4%, less than 0.3%, less than 0.2%, less than 0.1%, less than 0.09%, less than 0.08%, less than 0.07%, less than 0.06%, less than 0.05%, less than 0.04%, less than 0.03%, less than 0.02%, or less than 0.01% off-target editing in the target polynucleotide sequence.

[0775] In some embodiments, any of the ABE base editor variants described herein has lower guided off-target editing efficiency when delivered by an mRNA system compared to when delivered by a plasmid or vector system. In some embodiments, any of the ABE base editor variants described herein has at least 1%, at least 2%, at least 3%, at least 4%, at least 5%, at least 10%, at least 15%, at least 20%, at least 25%, at least 30%, at least 35%, at least 40%, at least 45%, at least 50%, at least 55%, at least 60%, at least 65%, at least 70%, at least 75%, at least 80%, at least 85%, at least 90%, at least 95%, or at least 99% lower guided off-target editing efficiency when delivered by an mRNA system compared to when delivered by a plasmid or vector system. In some embodiments, any of the ABE base editor variants described herein has at least 1.1 fold, at least 1.2 fold, at least 1.3 fold, at least 1.4 fold, at least 1.5 fold, at least 1.6 fold, at least 1.7 fold, at least 1.8 fold, at least 1.9 fold, at least 2.0 fold, at least 2.1 fold, at least 2.2 fold, at least 2.3 fold, at least 2.4 fold, at least 2.5 fold, at least 2.6 fold, at least 2.7 fold, at least 2.8 fold, at least 2.9 fold, or at least 3.0 fold lower guided off-target editing efficiency when delivered by an mRNA system compared to when delivered by a plasmid or vector system. In some embodiments, any of the ABE base editor variants described herein has at least about 2.2 fold decrease in guided off-target editing efficiency when delivered by an mRNA system compared to when delivered by a plasmid or vector system.

[0776] In some embodiments, any of the ABE base editor variants described herein has lower guide-independent off-target editing efficiency when delivered by an mRNA system compared to when delivered by a plasmid or vector system. In some embodiments, any of the ABE base editor variants described herein has at least 1%, at least 2%, at least 3%, at least 4%, at least 5%, at least 10%, at least 15%, at least 20%, at least 25%, at least 30%, at least 35%, at least 40%, at least 45%, at least 50%, at least 55%, at least 60%, at least 65%, at least 70%, at least 75%, at least 80%, at least 85%, at least 90%, at least 95%, or at least 99% lower guide-independent off-target editing efficiency when delivered by an mRNA system compared to when delivered by a plasmid or vector system. In some embodiments, any of the ABE base editor variants described herein has at least 1.1 fold, at least 1.2 fold, at least 1.3 fold, at least 1.4 fold, at least 1.5 fold, at least 1.6 fold, at least 1.7 fold, at least 1.8 fold, at least 1.9 fold, at least 2.0 fold, at least 2.1 fold, at least 2.2 fold, at least 2.3 fold, at least 2.4 fold, at least 2.5 fold, at least 2.6 fold, at least 2.7 fold, at least 2.8 fold, at least 2.9 fold, at least 3.0 fold, at least 5.0 fold, at least 10.0 fold, at least 20.0 fold, at least 50.0 fold, at least 70.0 fold, at least 100.0 fold, at least 120.0 fold, at least 130.0 fold, or at least 150.0 fold lower guide-independent off-target editing efficiency when delivered by an mRNA system compared to when delivered by a plasmid or vector system. In some embodiments, ABE base editor variants described herein has 134.0 fold decrease in guide-independent off-target editing efficiency (e.g., spurious RNA deamination) when delivered by an mRNA system compared to when delivered by a plasmid or vector system. In some embodiments, ABE base editor variants described herein does not increase guide-independent mutation rates across the genome.

[0777] In some embodiments, a single gene delivery event (e.g., by transduction, transfection, electroporation or any other method) can be used to target base editing of 5 sequences within a cell's genome. In some embodiments, a single gene delivery event can be used to target base editing of 6 sequences within a cell's genome. In some embodiments, a single gene delivery event can be used to target base editing of 7 sequences within a cell's genome. In some embodiments, a single electroporation event can be used to target base editing of 8 sequences within a cell's genome. In some embodiments, a single gene delivery event can be used to target base editing of 9 sequences within a cell's genome. In some embodiments, a single gene delivery event can be used to target base editing of 10 sequences within a cell's genome. In some embodiments, a single gene delivery event can be used to target base editing of 20 sequences within a cell's genome. In some embodiments, a single gene delivery event can be used to target base editing of 30 sequences within a cell's genome. In some embodiments, a single gene delivery event can be used to target base editing of 40 sequences within a cell's genome. In some embodiments, a single gene delivery event can be used to target base editing of 50 sequences within a cell's genome.

[0778] In some embodiments, the method described herein, for example, the base editing methods has minimum to no off-target effects.

[0779] In some embodiments, the base editing method described herein results in at least 50% of a cell population that have been successfully edited (i.e., cells that have been successfully engineered). In some embodiments, the base editing method described herein results in at least 55% of a cell population that have been successfully edited. In some embodiments, the base editing method described herein results in at least 60% of a cell population that have been successfully edited. In some embodiments, the base editing method described herein results in at least 65% of a cell population that have been successfully edited. In some embodiments, the base editing method described herein results in at least 70% of a cell population that have been successfully edited. In some embodiments, the base editing method described herein results in at least 75% of a cell population that have been successfully edited. In some embodiments, the base editing method described herein results in at least 80% of a cell population that have been successfully edited. In some embodiments, the base editing method described herein results in at least 85% of a cell population that have been successfully edited. In some embodiments, the base editing method described herein results in at least 90% of a cell population that have been successfully edited. In some embodiments, the base editing method described herein results in at least 95% of a cell population that have been successfully edited. In some embodiments, the base editing method described herein results in about 91%, 92%, 93%, 94%, 95%, 96%, 97%, 98%, 99% or 100% of a cell population that have been successfully edited.

[0780] In some embodiments, the live cell recovery following a base editing intervention is greater than at least 60%, 70%, 80%, 90% of the starting cell population at the time of the base editing event. In some embodiments, the live cell recovery as described above is about 70%. In some embodiments, the live cell recovery as described above is about 75%. In some embodiments, the live cell recovery as described above is about 80%. In some embodiments, the live cell recovery as described above is about 85%. In some embodiments, the live cell recovery as described above is about 90%, or about 91%, 92%, 93%, 94% 95%, 96%, 97%, 98%, or 99%, or 100% of the cells in the population at the time of the base editing event.

[0781] In some embodiments the engineered cell population can be further expanded in vitro by about 2 fold, about 3-fold, about 4-fold, about 5-fold, about 6-fold, about 7-fold, about 8-fold, about 9-fold, about 10-fold, about 15-fold, about 20-fold, about 25-fold, about 30-fold, about 35-fold, about 40-fold, about 45-fold, about 50-fold, or about 100-fold.

[0782] The number of intended mutations and indels can be determined using any suitable method, for example, as described in International PCT Application Nos. PCT/2017/045381 (WO2018/027078) and PCT/US2016/058344 (WO2017/070632); Komor, A. C., et al., “Programmable editing of a target base in genomic DNA without double-stranded DNA cleavage” Nature 533, 420-424 (2016); Gaudelli, N. M., et al., “Programmable base editing of A·T to G·C in genomic DNA without DNA cleavage” Nature 551, 464-471 (2017); and Komor, A. C., et al., “Improved base excision repair inhibition and bacteriophage Mu Gam protein yields C:G-to-T:A base editors with higher efficiency and product purity” Science Advances 3:eaao4774 (2017); the entire contents of which are hereby incorporated by reference.

[0783] In some embodiments, to calculate indel frequencies, sequencing reads are scanned for exact matches to two 10-bp sequences that flank both sides of a window in which indels can occur. If no exact matches are located, the read is excluded from analysis. If the length of this indel window exactly matches the reference sequence the read is classified as not containing an indel. If the indel window is two or more bases longer or shorter than the reference sequence, then the sequencing read is classified as an insertion or deletion, respectively. In some embodiments, the base editors provided herein can limit formation of indels in a region of a nucleic acid. In some embodiments, the region is at a nucleotide targeted by a base editor or a region within 2, 3, 4, 5, 6, 7, 8, 9, or 10 nucleotides of a nucleotide targeted by a base editor.

[0784] The number of indels formed at a target nucleotide region can depend on the amount of time a nucleic acid (e.g., a nucleic acid within the genome of a cell) is exposed to a base editor. In some embodiments, the number or proportion of indels is determined after at least 1 hour, at least 2 hours, at least 6 hours, at least 12 hours, at least 24 hours, at least 36 hours, at least 48 hours, at least 3 days, at least 4 days, at least 5 days, at least 7 days, at least 10 days, or at least 14 days of exposing the target nucleotide sequence (e.g., a nucleic acid within the genome of a cell) to a base editor. It should be appreciated that the characteristics of the base editors as described herein can be applied to any of the fusion proteins, or methods of using the fusion proteins provided herein.

[0785] Details of base editor efficiency are described in International PCT Application Nos. PCT/2017/045381 (WO 2018/027078) and PCT/US2016/058344 (WO 2017/070632), each of which is incorporated herein by reference for its entirety. Also see Komor, A. C., et al., “Programmable editing of a target base in genomic DNA without double-stranded DNA cleavage” Nature 533, 420-424 (2016); Gaudelli, N. M., et al., “Programmable base editing of A·T to G·C in genomic DNA without DNA cleavage” Nature 551, 464-471 (2017); and Komor, A. C., et al., “Improved base excision repair inhibition and bacteriophage Mu Gam protein yields C:G-to-T:A base editors with higher efficiency and product purity” Science Advances 3:eaao4774 (2017), the entire contents of which are hereby incorporated by reference. In some embodiments, editing of a plurality of nucleobase pairs in one or more genes using the methods provided herein results in formation of at least one intended mutation. In some embodiments, said formation of said at least one intended mutation results in the disruption the normal function of a gene. In some embodiments, said formation of said at least one intended mutation results decreases or eliminates the expression of a protein encoded by a gene. It should be appreciated that multiplex editing can be accomplished using any method or combination of methods provided herein.

### Multiplex Editing

[0786] In some embodiments, the base editor system provided herein is capable of multiplex editing of a plurality of nucleobase pairs in one or more genes. In some embodiments, the plurality of nucleobase pairs is located in the same gene. In some embodiments, the plurality of nucleobase pairs is located in one or more gene, wherein at least one gene is located in a different locus. In some embodiments, the multiplex editing can comprise one or more guide polynucleotides. In some embodiments, the multiplex editing can comprise one or more base editor systems. In some embodiments, the multiplex editing can comprise one or more base editor systems with a single guide polynucleotide. In some embodiments, the multiplex editing can comprise one or more base editor systems with a plurality of guide polynucleotides. In some embodiments, the multiplex editing can comprise one or more guide polynucleotides with a single base editor system. In some embodiments, the multiplex editing can comprise at least one guide polynucleotide that does not require a PAM sequence to target binding to a target polynucleotide sequence. In some embodiments, multiplex editing can comprise at least one guide polynucleotide that requires a PAM sequence to target binding to a target polynucleotide sequence. In some embodiments, the multiplex editing can comprise a mix of at least one guide polynucleotide that does not require a PAM sequence to target binding to a target polynucleotide sequence and at least one guide polynucleotide that require a PAM sequence to target binding to a target polynucleotide sequence. It should be appreciated that the characteristics of the multiplex editing using any of the base editors as described herein can be applied to any combination of methods using any base editor provided herein. It should also be appreciated that the multiplex editing using any of the base editors as described herein can comprise a sequential editing of a plurality of nucleobase pairs.

[0787] In some embodiments, the plurality of nucleobase pairs are in one more genes. In some embodiments, the plurality of nucleobase pairs is in the same gene. In some embodiments, at least one gene in the one more genes is located in a different locus.

[0788] In some embodiments, the editing is editing of the plurality of nucleobase pairs in at least one protein coding region. In some embodiments, the editing is editing of the plurality of nucleobase pairs in at least one protein non-coding region. In some embodiments, the editing is editing of the plurality of nucleobase pairs in at least one protein coding region and at least one protein non-coding region.

[0789] In some embodiments, the editing is in conjunction with one or more guide polynucleotides. In some embodiments, the base editor system can comprise one or more base editor system. In some embodiments, the base editor system can comprise one or more base editor systems in conjunction with a single guide polynucleotide. In some embodiments, the base editor system can comprise one or more base editor system in conjunction with a plurality of guide polynucleotides. In some embodiments, the editing is in conjunction with one or more guide polynucleotide with a single base editor system. In some embodiments, the editing is in conjunction with at least one guide polynucleotide that does not require a PAM sequence to target binding to a target polynucleotide sequence. In some embodiments, the editing is in conjunction with at least one guide polynucleotide that require a PAM sequence to target binding to a target polynucleotide sequence. In some embodiments, the editing is in conjunction with a mix of at least one guide polynucleotide that does not require a PAM sequence to target binding to a target polynucleotide sequence and at least one guide polynucleotide that require a PAM sequence to target binding to a target polynucleotide sequence. It should be appreciated that the characteristics of the multiplex editing using any of the base editors as described herein can be applied to any of combination of the methods of using any of the base editors provided herein. It should also be appreciated that the editing can comprise a sequential editing of a plurality of nucleobase pairs.

[0790] In some embodiments, the base editor system capable of multiplex editing of a plurality of nucleobase pairs in one or more genes comprises one of the ABE base editor variants described herein. In some embodiments, the base editor system capable of multiplex editing of a plurality of nucleobase pairs in one or more genes comprises one of ABE7 base editors. In some embodiments, the base editor system capable of multiplex editing comprising one of the ABE base editor variants described herein has higher multiplex editing efficiency compared the base editor system capable of multiplex editing comprising one of ABE7 base editors. In some embodiments, the base editor system capable of multiplex editing comprising one of the ABE base editor variants described herein has at least 1%, at least 2%, at least 3%, at least 4%, at least 5%, at least 10%, at least 15%, at least 20%, at least 25%, at least 30%, at least 35%, at least 40%, at least 45%, at least 50%, at least 55%, at least 60%, at least 65%, at least 70%, at least 75%, at least 80%, at least 85%, at least 90%, at least 95%, at least 99%, at least 100%, at least 105%, at least 110%, at least 115%, at least 120%, at least 125%, at least 130%, at least 135%, at least 140%, at least 145%, at least 150%, at least 155%, at least 160%, at least 165%, at least 170%, at least 175%, at least 180%, at least 185%, at least 190%, at least 195%, at least 200%, at least 210%, at least 220%, at least 230%, at least 240%, at least 250%, at least 260%, at least 270%, at least 280%, at least 290%, at least 300% higher, at least 310%, at least 320%, at least 330%, at least 340%, at least 350%, at least 360%, at least 370%, at least 380%, at least 390%, at least 400%, at least 450%, or at least 500% higher multiplex editing efficiency compared the base editor system capable of multiplex editing comprising one of ABE7 base editors. In some embodiments, the base editor system capable of multiplex editing comprising one of the ABE base editor variants described herein has at least 1.1 fold, at least 1.2 fold, at least 1.3 fold, at least 1.4 fold, at least 1.5 fold, at least 1.6 fold, at least 1.7 fold, at least 1.8 fold, at least 1.9 fold, at least 2.0 fold, at least 2.1 fold, at least 2.2 fold, at least 2.3 fold, at least 2.4 fold, at least 2.5 fold, at least 2.6 fold, at least 2.7 fold, at least 2.8 fold, at least 2.9 fold, at least 3.0 fold, at least 3.1 fold, at least 3.2 fold, at least 3.3 fold, at least 3.4 fold, at least 3.5 fold, at least 4.0 fold, at least 4.5 fold, at least 5.0 fold, at least 5.5 fold, or at least 6.0 fold higher multiplex editing efficiency compared the base editor system capable of multiplex editing comprising one of ABE7 base editors.

### Delivery System

[0791] Nucleic Acid-Based Delivery of Nucleobase Editors and gRNAs

[0792] Nucleic acids encoding an adenosine deaminase nucleobase editor according to the present disclosure can be administered to subjects or delivered into cells in vitro, ex vivo, or in vivo by art-known methods or as described herein. For example, adenosine deaminase nucleobase editors can be delivered by, e.g., vectors (e.g., viral or non-viral vectors), non-vector based methods (e.g., using naked DNA, DNA complexes, lipid nanoparticles), or a combination thereof.

[0793] Nucleic acids encoding adenosine deaminase nucleobase editors can be delivered directly to cells (e.g., hematopoietic cells or their progenitors, hematopoietic stem cells, and/or induced pluripotent stem cells) as naked DNA or RNA, for instance by means of transfection or electroporation, or can be conjugated to molecules (e.g., N-acetylgalactosamine) promoting uptake by the target cells. Nucleic acid vectors, such as the vectors described herein can also be used.

[0794] Nucleic acid vectors can comprise one or more sequences encoding a domain of a fusion protein described herein. A vector can also comprise a sequence encoding a signal peptide (e.g., for nuclear localization, nucleolar localization, or mitochondrial localization), associated with (e.g., inserted into or fused to) a sequence coding for a protein. As one example, a nucleic acid vectors can include a Cas9 coding sequence that includes one or more nuclear localization sequences (e.g., a nuclear localization sequence from SV40), and an adenosine deaminase variant (e.g., TadA variant).

[0795] The nucleic acid vector can also include any suitable number of regulatory/control elements, e.g., promoters, enhancers, introns, polyadenylation signals, Kozak consensus sequences, or internal ribosome entry sites (IRES). These elements are well known in the art.

[0796] Nucleic acid vectors according to this disclosure include recombinant viral vectors. Exemplary viral vectors are set forth herein. Other viral vectors known in the art can also be used. In addition, viral particles can be used to deliver base editing system components in nucleic acid and/or peptide form. For example, “empty” viral particles can be assembled to contain any suitable cargo. Viral vectors and viral particles can also be engineered to incorporate targeting ligands to alter target tissue specificity.

[0797] In addition to viral vectors, non-viral vectors can be used to deliver nucleic acids encoding genome editing systems according to the present disclosure. One important category of non-viral nucleic acid vectors are nanoparticles, which can be organic or inorganic. Nanoparticles are well known in the art. Any suitable nanoparticle design can be used to deliver genome editing system components or nucleic acids encoding such components. For instance, organic (e.g. lipid and/or polymer) nanoparticles can be suitable for use as delivery vehicles in certain embodiments of this disclosure.

### Nucleic Acid-Based Delivery of Base Editor Systems

[0798] Nucleic acid molecules encoding a base editor system according to the present disclosure can be administered to subjects or delivered into cells in vitro or in vivo by art-known methods or as described herein. For example, a base editor system comprising a deaminase (e.g., cytidine or adenine deaminase) can be delivered by vectors (e.g., viral or non-viral vectors), or by naked DNA, DNA complexes, lipid nanoparticles, or a combination of the aforementioned compositions.

[0799] Nanoparticles, which can be organic or inorganic, are useful for delivering a base editor system or component thereof. Nanoparticles are well known in the art and any suitable nanoparticle can be used to deliver a base editor system or component thereof, or a nucleic acid molecule encoding such components. In one example, organic (e.g. lipid and/or polymer) nanoparticles are suitable for use as delivery vehicles in certain embodiments of this disclosure.

[0800] Exemplary lipids for use in nanoparticle formulations, and/or gene transfer are shown in Table 15 (below).

TABLE 15
Lipids Used for Gene Transfer

| Lipid | Abbreviation | Feature |
|---|---|---|
| 1,2-Dioleoyl-sn-glycero-3-phosphatidylcholine | DOPC | Helper |
| 1,2-Dioleoyl-sn-glycero-3-phosphatidylethanolamine | DOPE | Helper |
| Cholesterol | | Helper |
| N-[1-(2,3-Dioleyloxy)prophy1]N,N,N-trimethylammonium | DOTMA | Cationic |
| chloride | | |
| 1,2-Dioleoyloxy-3-trimethylammonium-propane | DOTAP | Cationic |
| Dioctadecylamidoglycylspermine | DOGS | Cationic |
| N-(3-Aminopropyl)-N,N-dimethyl-2,3-bis(dodecyloxy)-1- | GAP-DLRIE | Cationic |
| propanaminium bromide | | |
| Cetyltrimethylammonium bromide | CTAB | Cationic |
| 6-Lauroxyhexyl ornithinate | LHON | Cationic |
| 1-(2,3-Dioleoyloxypropyl)-2,4,6-trimethylpyridinium | 20c | Cationic |
| 2,3-Dioleyloxy-N-[2(sperminecarboxamido-ethyl]-N,N- | DOSPA | Cationic |
| dimethyl-1-propanaminium trifluoroacetate | | |
| 1,2-Dioleyl-3-trimethylammonium-propane | DOPA | Cationic |
| N-(2-Hydroxyethyl)-N,N-dimethyl-2,3-bis(tetradecyloxy)-1- | MDRIE | Cationic |
| propanaminium bromide | | |
| Dimyristooxypropyl dimethyl hydroxyethyl ammonium bromide | DMRI | Cationic |
| 3β-[N-(N′,N′-Dimethylaminoethane)-carbamoyl]cholesterol | DC-Chol | Cationic |
| Bis-guanidium-tren-cholesterol | BGTC | Cationic |
| 1,3-Diodeoxy-2-(6-carboxy-spermyl)-propylamide | DOSPER | Cationic |
| Dimethyloctadecylammonium bromide | DDAB | Cationic |
| Dioctadecylamidoglicylspermidin | DSL | Cationic |
| rac-[(2,3-Dioctadecyloxypropyl)(2-hydroxyethyl)]- | CLIP-1 | Cationic |
| dimethylammonium chloride | | |
| rac-[2(2,3-Dihexadecyloxypropyl- | CLIP-6 | Cationic |
| oxymethyloxy)ethyl ]trimethylammoniun bromide | EDMPC | Cationic |
| Ethyldimyristoylphosphatidylcholine | | |
| 1,2-Distearyloxy-N,N-dimethyl-3-aminopropane | DSDMA | Cationic |
| 1,2-Dimyristoyl-trimethylammonium propane | DMTAP | Cationic |
| O,O′-Dimyristyl-N-lysyl aspartate | DMKE | Cationic |
| 1,2-Distearoyl-sn-glycero-3-ethylpho sphocholine | DSEPC | Cationic |
| N-Palmitoyl D-erythro-sphingosyl carbamoyl-spermine | CCS | Cationic |
| N-t-Butyl-NO-tetradecyl-3-tetradecylaminopropionamidine | diC14-amidine | Cationic |
| Octadecenolyoxy[ethyl-2-heptadeceny1-3 hydroxyethyl] | DOTIM | Cationic |
| imidazolinium chloride | | |
| N1 -Cholesteryloxycarbonyl-3,7-diazanonane-1,9-diamine | CDAN | Cationic |
| 2-(3-[Bis(3-amino-propyl)-amino]propylamino)-N- | RPR209120 | Cationic |
| ditetradecylcarbamoylme-ethyl-acetamide | | |
| 1,2-dilinoleyloxy-3-dimethylaminopropane | DLinDMA | Cationic |
| 2,2-dilinoley1-4-dimethylaminoethyl-[1,3]-dioxolane | DLin-KC2- | Cationic |
| | DMA | |
| dilinoleyl-methyl-4-dimethylaminobutyrate | DLin-MC3- | Cationic |
| | DMA | |

[0801] Table 16 lists exemplary polymers for use in gene transfer and/or nanoparticle formulations.

TABLE 16
Polymers Used for Gene Transfer

| Polymer | Abbreviation |
|---|---|
| Poly(ethylene)glycol | PEG |
| Polyethylenimine | PEI |
| Dithiobis (succinimidylpropionate) | DSP |
| Dimethyl-3,3′-dithiobispropionimidate | DTBP |
| Poly(ethylene imine)biscarbamate | PEIC |
| Poly(L-lysine) | PLL |
| Histidine modified | PLL |
| Poly(N-vinylpyrrolidone) | PVP |
| Poly(propylenimine) | PPI |
| Poly(amidoamine) | PAMAM |
| Poly(amidoethylenimine) | SS-PAEI |
| Triethylenetetramine | TETA |
| Poly(β-aminoester) | |
| Poly(4-hydroxy-L-proline ester) | PHP |
| Poly(allylamine) | |
| Poly(α-[4-aminobutyl]-L-glycolic acid) | PAGA |
| Poly(D,L-lactic-co-glycolic acid) | PLGA |
| Poly(N-ethyl-4-vinylpyridinium bromide) | |
| Poly(phosphazene)s | PPZ |
| Poly(phosphoester)s | PPE |
| Poly(phosphoramidate)s | PPA |
| Poly(N-2-hydroxypropylmethacrylamide) | PHPMA |
| Poly (2-(dimethylamino)ethyl methacrylate) | pDMAEMA |
| Poly(2-aminoethyl propylene phosphate) | PPE-EA |
| Chitosan | |
| Galactosylated chitosan | |
| N-Dodacylated chitosan | |
| Histone | |
| Collagen | |
| Dextran-spermine | D-SPM |

[0802] Table 17 summarizes delivery methods for a polynucleotide encoding a fusion protein described herein.

TABLE 17

| | | Delivery into | | | Type of |
|---|---|---|---|---|---|
| | | Non-Dividing | Duration of | Genome | Molecule |
| Delivery | Vector/Mode | Cells | Expression | Integration | Delivered |
| Physical | (e.g., | YES | Transient | NO | Nucleic Acids |
| | electroporation, | | | | and Proteins |
| | particle gun, | | | | |
| | Calcium | | | | |
| | Phosphate | | | | |
| | transfection | | | | |
| Viral | Retrovirus | NO | Stable | YES | RNA |
| | Lentivirus | YES | Stable | YES/NO with | RNA |
| | | | | modification | |
| | Adenovirus | YES | Transient | NO | DNA |
| | Adeno- | YES | Stable | NO | DNA |
| | Associated | YES | Very | NO | DNA |
| | Virus (AAV) | | Transient | | |
| | Vaccinia Virus | | | | |
| | Herpes Simplex | YES | Stable | NO | DNA |
| | Virus | | | | |
| Non-Viral | Cationic | YES | Transient | Depends on | Nucleic Acids |
| | Liposomes | | | what is | and Proteins |
| | | | | delivered | |
| | Polymeric | YES | Transient | Depends on | Nucleic Acids |
| | Nanoparticles | | | what is | and Proteins |
| | | | | delivered | |
| Biological | Attenuated | YES | Transient | NO | Nucleic Acids |
| Non-Viral | Bacteria | | | | |
| Delivery | Engineered | YES | Transient | NO | Nucleic Acids |
| Vehicles | Bacteriophages | YES | Transient | NO | Nucleic Acids |
| | Mammalian | | | | |
| | Virus-like | | | | |
| | Particles | YES | Transient | NO | Nucleic Acids |
| | Biological | | | | |
| | liposomes: | | | | |
| | Erythrocyte | | | | |
| | Ghosts and | | | | |
| | Exosomes | | | | |

[0803] In another aspect, the delivery of genome editing system components or nucleic acids encoding such components, for example, a nucleic acid binding protein such as, for example, Cas9 or variants thereof, and a gRNA targeting a genomic nucleic acid sequence of interest, may be accomplished by delivering a ribonucleoprotein (RNP) to cells. The RNP comprises the nucleic acid binding protein, e.g., Cas9, in complex with the targeting gRNA. RNPs may be delivered to cells using known methods, such as electroporation, nucleofection, or cationic lipid-mediated methods, for example, as reported by Zuris, J. A. et al., 2015, Nat. Biotechnology, 33(1):73-80. RNPs are advantageous for use in CRISPR base editing systems, particularly for cells that are difficult to transfect, such as primary cells. In addition, RNPs can also alleviate difficulties that may occur with protein expression in cells, especially when eukaryotic promoters, e.g., CMV or EF1A, which may be used in CRISPR plasmids, are not well-expressed. Advantageously, the use of RNPs does not require the delivery of foreign DNA into cells. Moreover, because an RNP comprising a nucleic acid binding protein and gRNA complex is degraded over time, the use of RNPs has the potential to limit off-target effects. In a manner similar to that for plasmid based techniques, RNPs can be used to deliver binding protein (e.g., Cas9 variants) and to direct homology directed repair (HDR).

[0804] A promoter used to drive base editor coding nucleic acid molecule expression can include AAV ITR. This can be advantageous for eliminating the need for an additional promoter element, which can take up space in the vector. The additional space freed up can be used to drive the expression of additional elements, such as a guide nucleic acid or a selectable marker. ITR activity is relatively weak, so it can be used to reduce potential toxicity due to over expression of the chosen nuclease.

[0805] Any suitable promoter can be used to drive expression of the base editor and, where appropriate, the guide nucleic acid. For ubiquitous expression, promoters that can be used include CMV, CAG, CBh, PGK, SV40, Ferritin heavy or light chains, etc. For brain or other CNS cell expression, suitable promoters can include: SynapsinI for all neurons, CaMKIIalpha for excitatory neurons, GAD67 or GAD65 or VGAT for GABAergic neurons, etc. For liver cell expression, suitable promoters include the Albumin promoter. For lung cell expression, suitable promoters can include SP-B. For endothelial cells, suitable promoters can include ICAM. For hematopoietic cells suitable promoters can include IFNbeta or CD45. For Osteoblasts suitable promoters can include OG-2.

[0806] In some embodiments, a base editor of the present disclosure is of small enough size to allow separate promoters to drive expression of the base editor and a compatible guide nucleic acid within the same nucleic acid molecule. For instance, a vector or viral vector can comprise a first promoter operably linked to a nucleic acid encoding the base editor and a second promoter operably linked to the guide nucleic acid.

[0807] The promoter used to drive expression of a guide nucleic acid can include: Pol III promoters such as U6 or H1 Use of Pol II promoter and intronic cassettes to express gRNA Adeno Associated Virus (AAV).

[0808] In particular embodiments, a fusion protein as described herein is encoded by a polynucleotide present in a viral vector (e.g., adeno-associated virus (AAV), AAV3, AAV3b, AAV4, AAV5, AAV6, AAV7, AAV8, AAV9, AAVrh8, AAV10, and variants thereof), or a suitable capsid protein of any viral vector. Thus, in some aspects, the disclosure relates to the viral delivery of a fusion protein. Examples of viral vectors include retroviral vectors (e.g. Maloney murine leukemia virus, MML-V), adenoviral vectors (e.g. AD100), lentiviral vectors (HIV and FIV-based vectors), herpesvirus vectors (e.g. HSV-2).

### Viral Vectors

[0809] A base editor described herein can therefore be delivered with viral vectors. In some embodiments, a base editor disclosed herein can be encoded on a nucleic acid that is contained in a viral vector. In some embodiments, one or more components of the base editor system can be encoded on one or more viral vectors. For example, a base editor and guide nucleic acid can be encoded on a single viral vector. In other embodiments, the base editor and guide nucleic acid are encoded on different viral vectors. In either case, the base editor and guide nucleic acid can each be operably linked to a promoter and terminator. The combination of components encoded on a viral vector can be determined by the cargo size constraints of the chosen viral vector.

[0810] The use of RNA or DNA viral based systems for the delivery of a base editor takes advantage of highly evolved processes for targeting a virus to specific cells in culture or in the host and trafficking the viral payload to the nucleus or host cell genome. Viral vectors can be administered directly to cells in culture, patients (in vivo), or they can be used to treat cells in vitro, and the modified cells can optionally be administered to patients (ex vivo). Conventional viral based systems could include retroviral, lentivirus, adenoviral, adeno-associated and herpes simplex virus vectors for gene transfer. Integration in the host genome is possible with the retrovirus, lentivirus, and adeno-associated virus gene transfer methods, often resulting in long term expression of the inserted transgene. Additionally, high transduction efficiencies have been observed in many different cell types and target tissues.

[0811] Viral vectors can include lentivirus (e.g., HIV and FIV-based vectors), Adenovirus (e.g., AD100), Retrovirus (e.g., Maloney murine leukemia virus, MML-V), herpesvirus vectors (e.g., HSV-2), and Adeno-associated viruses (AAVs), or other plasmid or viral vector types, in particular, using formulations and doses from, for example, U.S. Pat. No. 8,454,972 (formulations, doses for adenovirus), U.S. Pat. No. 8,404,658 (formulations, doses for AAV) and U.S. Pat. No. 5,846,946 (formulations, doses for DNA plasmids) and from clinical trials and publications regarding the clinical trials involving lentivirus, AAV and adenovirus. For example, for AAV, the route of administration, formulation and dose can be as in U.S. Pat. No. 8,454,972 and as in clinical trials involving AAV. For Adenovirus, the route of administration, formulation and dose can be as in U.S. Pat. No. 8,404,658 and as in clinical trials involving adenovirus. For plasmid delivery, the route of administration, formulation and dose can be as in U.S. Pat. No. 5,846,946 and as in clinical studies involving plasmids. Doses can be based on or extrapolated to an average 70 kg individual (e.g. a male adult human), and can be adjusted for patients, subjects, mammals of different weight and species. Frequency of administration is within the ambit of the medical or veterinary practitioner (e.g., physician, veterinarian), depending on usual factors including the age, sex, general health, other conditions of the patient or subject and the particular condition or symptoms being addressed. The viral vectors can be injected into the tissue of interest. For cell-type specific base editing, the expression of the base editor and optional guide nucleic acid can be driven by a cell-type specific promoter.

[0812] The tropism of a retrovirus can be altered by incorporating foreign envelope proteins, expanding the potential target population of target cells. Lentiviral vectors are retroviral vectors that are able to transduce or infect non-dividing cells and typically produce high viral titers. Selection of a retroviral gene transfer system would therefore depend on the target tissue. Retroviral vectors are comprised of cis-acting long terminal repeats with packaging capacity for up to 6-10 kb of foreign sequence. The minimum cis-acting LTRs are sufficient for replication and packaging of the vectors, which are then used to integrate the therapeutic gene into the target cell to provide permanent transgene expression. Widely used retroviral vectors include those based upon murine leukemia virus (MuLV), gibbon ape leukemia virus (GaLV), Simian Immuno deficiency virus (SIV), human immuno deficiency virus (HIV), and combinations thereof (See, e.g., Buchscher et al., J. Virol. 66:2731-2739 (1992); Johann et al., J. Virol. 66:1635-1640 (1992); Sommnerfelt et al., Virol. 176:58-59 (1990); Wilson et al., J. Virol. 63:2374-2378 (1989); Miller et al., J. Virol. 65:2220-2224 (1991); PCT/US94/05700).

[0813] Retroviral vectors, especially lentiviral vectors, can require polynucleotide sequences smaller than a given length for efficient integration into a target cell. For example, retroviral vectors of length greater than 9 kb can result in low viral titers compared with those of smaller size. In some aspects, a base editor of the present disclosure is of sufficient size so as to enable efficient packaging and delivery into a target cell via a retroviral vector. In some embodiments, a base editor is of a size so as to allow efficient packing and delivery even when expressed together with a guide nucleic acid and/or other components of a targetable nuclease system.

[0814] Packaging cells are typically used to form virus particles that are capable of infecting a host cell. Such cells include 293 cells, which package adenovirus, and psi.2 cells or PA317 cells, which package retrovirus. Viral vectors used in gene therapy are usually generated by producing a cell line that packages a nucleic acid vector into a viral particle. The vectors typically contain the minimal viral sequences required for packaging and subsequent integration into a host, other viral sequences being replaced by an expression cassette for the polynucleotide(s) to be expressed. The missing viral functions are typically supplied in trans by the packaging cell line. For example, Adeno-associated virus (“AAV”) vectors used in gene therapy typically only possess ITR sequences from the AAV genome which are required for packaging and integration into the host genome. Viral DNA can be packaged in a cell line, which contains a helper plasmid encoding the other AAV genes, namely rep and cap, but lacking ITR sequences. The cell line can also be infected with adenovirus as a helper. The helper virus can promote replication of the AAV vector and expression of AAV genes from the helper plasmid. The helper plasmid in some cases is not packaged in significant amounts due to a lack of ITR sequences. Contamination with adenovirus can be reduced by, e.g., heat treatment to which adenovirus is more sensitive than AAV.

[0815] In applications where transient expression is preferred, adenoviral based systems can be used. Adenoviral based vectors are capable of very high transduction efficiency in many cell types and do not require cell division. With such vectors, high titer and levels of expression have been obtained. This vector can be produced in large quantities in a relatively simple system. Adeno-associated virus (“AAV”) vectors can also be used to transduce cells with target nucleic acids, e.g., in the in vitro production of nucleic acids and peptides, and for in vivo and ex vivo gene therapy procedures (See, e.g., West et al., Virology 160:38-47 (1987); U.S. Pat. No. 4,797,368; WO 93/24641; Kotin, Human Gene Therapy 5:793-801 (1994); Muzyczka, J. Clin. Invest. 94:1351 (1994). The construction of recombinant AAV vectors is described in a number of publications, including U.S. Pat. No. 5,173,414; Tratschin et al., Mol. Cell. Biol. 5:3251-3260 (1985); Tratschin, et al., Mol. Cell. Biol. 4:2072-2081 (1984); Hermonat & Muzyczka, PNAS 81:6466-6470 (1984); and Samulski et al., J. Virol. 63:03822-3828 (1989).

[0816] AAV is a small, single-stranded DNA dependent virus belonging to the parvovirus family. The 4.7 kb wild-type (wt) AAV genome is made up of two genes that encode four replication proteins and three capsid proteins, respectively, and is flanked on either side by 145-bp inverted terminal repeats (ITRs). The virion is composed of three capsid proteins, Vp1, Vp2, and Vp3, produced in a 1:1:10 ratio from the same open reading frame but from differential splicing (Vp1) and alternative translational start sites (Vp2 and Vp3, respectively). Vp3 is the most abundant subunit in the virion and participates in receptor recognition at the cell surface defining the tropism of the virus. A phospholipase domain, which functions in viral infectivity, has been identified in the unique N terminus of Vp1.

[0817] Similar to wt AAV, recombinant AAV (rAAV) utilizes the cis-acting 145-bp ITRs to flank vector transgene cassettes, providing up to 4.5 kb for packaging of foreign DNA. Subsequent to infection, rAAV can express a fusion protein as described herein and persist without integration into the host genome by existing episomally in circular head-to-tail concatemers. Although there are numerous examples of rAAV success using this system, in vitro and in vivo, the limited packaging capacity has limited the use of AAV-mediated gene delivery when the length of the coding sequence of the gene is equal or greater in size than the wt AAV genome.

[0818] Viral vectors can be selected based on the application. For example, for in vivo or ex vivo gene delivery, AAV can be advantageous over other viral vectors. In some embodiments, AAV allows low toxicity, which can be due to the purification method not requiring ultra-centrifugation of cell particles that can activate the immune response. In some embodiments, AAV allows low probability of causing insertional mutagenesis because it does not integrate into the host genome. Adenoviruses are commonly used as vaccines because of the strong immunogenic response they induce. Packaging capacity of the viral vectors can limit the size of the base editor that can be packaged into the vector.

[0819] AAV has a packaging capacity of about 4.5 Kb or 4.75 Kb including two 145 base inverted terminal repeats (ITRs). This means disclosed base editor as well as a promoter and transcription terminator can fit into a single viral vector. Constructs larger than 4.5 or 4.75 Kb can lead to significantly reduced virus production. For example, SpCas9 is quite large, the gene itself is over 4.1 Kb, which makes it difficult for packing into AAV. Therefore, embodiments of the present disclosure include utilizing a disclosed base editor which is shorter in length than conventional base editors. In some examples, the base editors are less than 4 kb. Disclosed base editors can be less than 4.5 kb, 4.4 kb, 4.3 kb, 4.2 kb, 4.1 kb, 4 kb, 3.9 kb, 3.8 kb, 3.7 kb, 3.6 kb, 3.5 kb, 3.4 kb, 3.3 kb, 3.2 kb, 3.1 kb, 3 kb, 2.9 kb, 2.8 kb, 2.7 kb, 2.6 kb, 2.5 kb, 2 kb, or 1.5 kb. In some embodiments, the disclosed base editors are 4.5 kb or less in length.

[0820] An AAV can be AAV1, AAV2, AAV5 or any combination thereof. One can select the type of AAV with regard to the cells to be targeted; e.g., one can select AAV serotypes 1, 2, 5 or a hybrid capsid AAV1, AAV2, AAV5 or any combination thereof for targeting brain or neuronal cells; and one can select AAV4 for targeting cardiac tissue. AAV8 is useful for delivery to the liver. A tabulation of certain AAV serotypes as to these cells can be found in Grimm, D. et al, J. Virol. 82: 5887-5911 (2008)).

[0821] In some embodiments, lentiviral vectors are used. Lentiviruses are complex retroviruses that have the ability to infect and express their genes in both mitotic and post-mitotic cells. The most commonly known lentivirus is the human immunodeficiency virus (HIV), which uses the envelope glycoproteins of other viruses to target a broad range of cell types.

[0822] Lentiviruses can be prepared as follows. After cloning pCasES10 (which contains a lentiviral transfer plasmid backbone), HEK293FT at low passage (p=5) were seeded in a T-75 flask to 50% confluence the day before transfection in DMEM with 10% fetal bovine serum and without antibiotics. After 20 hours, media is changed to OptiMEM (serum-free) media and transfection was done 4 hours later. Cells are transfected with 10 μg of lentiviral transfer plasmid (pCasES10) and the following packaging plasmids: 5 μg of pMD2.G (VSV-g pseudotype), and 7.5 μg of psPAX2 (gag/pol/rev/tat). Transfection can be done in 4 mL OptiMEM with a cationic lipid delivery agent (50 μl Lipofectamine 2000 and 100 μl Plus reagent). After 6 hours, the media is changed to antibiotic-free DMEM with 10% fetal bovine serum. These methods use serum during cell culture, but serum-free methods are preferred.

[0823] Lentivirus can be purified as follows. Viral supernatants are harvested after 48 hours. Supernatants are first cleared of debris and filtered through a 0.45 μm low protein binding (PVDF) filter. They are then spun in an ultracentrifuge for 2 hours at 24,000 rpm. Viral pellets are resuspended in 50 μl of DMEM overnight at 4° C. They are then aliquoted and immediately frozen at −80° C.

[0824] In another embodiment, minimal non-primate lentiviral vectors based on the equine infectious anemia virus (EIAV) are also contemplated. In another embodiment, RetinoStat®, an equine infectious anemia virus-based lentiviral gene therapy vector that expresses angiostatic proteins endostatin and angiostatin that is contemplated to be delivered via a subretinal injection. In another embodiment, use of self-inactivating lentiviral vectors are contemplated.

[0825] Any RNA of the systems, for example a guide RNA or a base editor-encoding mRNA, can be delivered in the form of RNA. Base editor-encoding mRNA can be generated using in vitro transcription. For example, nuclease mRNA can be synthesized using a PCR cassette containing the following elements: T7 promoter, optional kozak sequence (GCCACC), nuclease sequence, and 3′ UTR such as a 3′ UTR from beta globin-polyA tail. The cassette can be used for transcription by T7 polymerase. Guide polynucleotides (e.g., gRNA) can also be transcribed using in vitro transcription from a cassette containing a T7 promoter, followed by the sequence “GG”, and guide polynucleotide sequence.

[0826] To enhance expression and reduce possible toxicity, the base editor-coding sequence and/or the guide nucleic acid can be modified to include one or more modified nucleoside e.g. using pseudo-uridine, 5-Methyl-cytosine, 2′-O-methyl-3′-phosphonoacetate, 2′-O-methyl (‘M’), 2′-O-methyl-3′-phosphorothioate (‘MS’) and 2′-O-methyl-3′-thiophosphonoacetate (‘MSP’), 5-methoxyuridine, phosphorothioate, and N1-Methylpseudouridine. Methods for using chemically modified mRNAs and guide RNAs are known in the art and described, for example, by Jiang et al., Chemical modifications of adenine base editor mRNA and guide RNA expand its application scope. Nat Commun 11, 1979 (2020). https://doi.org/10.1038/s41467-020-15892-8, Callum et al., N1-Methylpseudouridine substitution enhances the performance of synthetic mRNA switches in cells, Nucleic Acids Research, Volume 48, Issue 6, 6 Apr. 2020, Page e35, and Andries et al., Journal of Controlled Release, Volume 217, 10 Nov. 2015, Pages 337-344, each of which is incorporated herein by reference in its entirety.

[0827] The small packaging capacity of AAV vectors makes the delivery of a number of genes that exceed this size and/or the use of large physiological regulatory elements challenging. These challenges can be addressed, for example, by dividing the protein(s) to be delivered into two or more fragments, wherein the N-terminal fragment is fused to a split intein-N and the C-terminal fragment is fused to a split intein-C. These fragments are then packaged into two or more AAV vectors. As used herein, “intein” refers to a self-splicing protein intron (e.g., peptide) that ligates flanking N-terminal and C-terminal exteins (e.g., fragments to be joined). The use of certain inteins for joining heterologous protein fragments is described, for example, in Wood et al., J. Biol. Chem. 289(21); 14512-9 (2014). For example, when fused to separate protein fragments, the inteins IntN and IntC recognize each other, splice themselves out and simultaneously ligate the flanking N- and C-terminal exteins of the protein fragments to which they were fused, thereby reconstituting a full-length protein from the two protein fragments. Other suitable inteins will be apparent to a person of skill in the art.

[0828] A fragment of a fusion protein as described herein can vary in length. In some embodiments, a protein fragment ranges from 2 amino acids to about 1000 amino acids in length. In some embodiments, a protein fragment ranges from about 5 amino acids to about 500 amino acids in length. In some embodiments, a protein fragment ranges from about 20 amino acids to about 200 amino acids in length. In some embodiments, a protein fragment ranges from about 10 amino acids to about 100 amino acids in length. Suitable protein fragments of other lengths will be apparent to a person of skill in the art.

[0829] In one embodiment, dual AAV vectors are generated by splitting a large transgene expression cassette in two separate halves (5′ and 3′ ends, or head and tail), where each half of the cassette is packaged in a single AAV vector (of <5 kb). The re-assembly of the full-length transgene expression cassette is then achieved upon co-infection of the same cell by both dual AAV vectors followed by: (1) homologous recombination (HR) between 5′ and 3′ genomes (dual AAV overlapping vectors); (2) ITR-mediated tail-to-head concatemerization of 5′ and 3′ genomes (dual AAV trans-splicing vectors); or (3) a combination of these two mechanisms (dual AAV hybrid vectors). The use of dual AAV vectors in vivo results in the expression of full-length proteins. The use of the dual AAV vector platform represents an efficient and viable gene transfer strategy for transgenes of >4.7 kb in size.

### Inteins

[0830] Inteins (intervening protein) are auto-processing domains found in a variety of diverse organisms, which carry out a process known as protein splicing. Protein splicing is a multi-step biochemical reaction comprised of both the cleavage and formation of peptide bonds. While the endogenous substrates of protein splicing are proteins found in intein-containing organisms, inteins can also be used to chemically manipulate virtually any polypeptide backbone. Exemplary intein polypeptide sequences are provided in the Sequence Listing as SEQ ID NOs: 381-388.

[0831] In protein splicing, the intein excises itself out of a precursor polypeptide by cleaving two peptide bonds, thereby ligating the flanking extein (external protein) sequences via the formation of a new peptide bond. This rearrangement occurs post-translationally (or possibly co-translationally). Intein-mediated protein splicing occurs spontaneously, requiring only the folding of the intein domain.

[0832] About 5% of inteins are split inteins, which are transcribed and translated as two separate polypeptides, the N-intein and C-intein, each fused to one extein. Upon translation, the intein fragments spontaneously and non-covalently assemble into the canonical intein structure to carry out protein splicing in trans. The mechanism of protein splicing entails a series of acyl-transfer reactions that result in the cleavage of two peptide bonds at the intein-extein junctions and the formation of a new peptide bond between the N- and C-exteins. This process is initiated by activation of the peptide bond joining the N-extein and the N-terminus of the intein. Virtually all inteins have a cysteine or serine at their N-terminus that attacks the carbonyl carbon of the C-terminal N-extein residue. This N to O/S acyl-shift is facilitated by a conserved threonine and histidine (referred to as the TXXH motif), along with a commonly found aspartate, which results in the formation of a linear (thio)ester intermediate. Next, this intermediate is subject to trans-(thio)esterification by nucleophilic attack of the first C-extein residue (+1), which is a cysteine, serine, or threonine. The resulting branched (thio)ester intermediate is resolved through a unique transformation: cyclization of the highly conserved C-terminal asparagine of the intein. This process is facilitated by the histidine (found in a highly conserved HNF motif) and the penultimate histidine and may also involve the aspartate. This succinimide formation reaction excises the intein from the reactive complex and leaves behind the exteins attached through a non-peptidic linkage. This structure rapidly rearranges into a stable peptide bond in an intein-independent fashion.

[0833] In some embodiments, a portion or fragment of a nuclease (e.g., Cas9) is fused to an intein. The nuclease can be fused to the N-terminus or the C-terminus of the intein. In some embodiments, a portion or fragment of a fusion protein is fused to an intein and fused to an AAV capsid protein. The intein, nuclease and capsid protein can be fused together in any arrangement (e.g., nuclease-intein-capsid, intein-nuclease-capsid, capsid-intein-nuclease, etc.). In some embodiments, an N-terminal fragment of a base editor (e.g., ABE, CBE) is fused to a split intein-N and a C-terminal fragment is fused to a split intein-C. These fragments are then packaged into two or more AAV vectors. In some embodiments, the N-terminus of an intein is fused to the C-terminus of a fusion protein and the C-terminus of the intein is fused to the N-terminus of an AAV capsid protein.

[0834] In one embodiment, inteins are utilized to join fragments or portions of an adenosine deaminase base editor protein that is grafted onto an AAV capsid protein. The use of certain inteins for joining heterologous protein fragments is described, for example, in Wood et al., J. Biol. Chem. 289(21); 14512-9 (2014). For example, when fused to separate protein fragments, the inteins IntN and IntC recognize each other, splice themselves out and simultaneously ligate the flanking N- and C-terminal exteins of the protein fragments to which they were fused, thereby reconstituting a full-length protein from the two protein fragments. Other suitable inteins will be apparent to a person of skill in the art.

[0835] In some embodiments, an ABE was split into N- and C-terminal fragments at Ala, Ser, Thr, or Cys residues within selected regions of SpCas9. These regions correspond to loop regions identified by Cas9 crystal structure analysis. The N-terminus of each fragment is fused to an intein-N and the C-terminus of each fragment is fused to an intein C at amino acid positions S303, T310, T313, S355, A456, S460, A463, T466, S469, T472, T474, C574, S577, A589, and S590, which are indicated in bold capital letters in the sequence below.

(SEQ ID NO: 197)

| | |
|---|---|
| 1 | mdkkysigld igtnsvgwav itdeykvpsk kfkvlgntdr |
| | hsikknliga llfdsgetae |
| 61 | atrlkrtarr rytrrknric ylqeifsnem akvddsffhr |
| | leesflveed kkherhpifg |
| 121 | nivdevayhe kyptiyhlrk klvdstdkad lrliylalah |
| | mikfrghfli egdlnpdnsd |
| 181 | vdklfiqlvq tynqlfeenp inasgvdaka ilsarlsksr |
| | rlenliaqlp gekknglfgn |
| 241 | lialslgltp nfksnfdlae daklqlskdt ydddldnlla |
| | qigdqyadlf laaknlsdai |
| 301 | llSdilrvnT eiTkaplsas mikrydehhq dltllkalvr |
| | qqlpekykei ffdqskngya |
| 361 | gyidggasqe efykfikpil ekmdgteell vklnredllr |
| | kqrtfdngsi phqihlgelh |
| 421 | ailrrqedfy pflkdnreki ekiltfripy yvgplArgnS |
| | rfAwmTrkSe eTiTpwnfee |
| 481 | vvdkgasaqs fiermtnfdk nlpnekvlpk hsllyeyftv |
| | yneltkvkyv tegmrkpafl |
| 541 | sgeqkkaivd llfktnrkvt vkqlkedyfk kieCfdSvei |
| | sgvedrfnAS lgtyhdllki |
| 601 | ikdkdfldne enedilediv ltltlfedre mieerlktya |
| | hlfddkvmkq lkrrrytgwg |
| 661 | rlsrklingi rdkqsgktil dflksdgfan rnfmqlihdd |
| | sltfkediqk aqvsgqgdsl |
| 721 | hehianlags paikkgilqt vkvvdelvkv mgrhkpeniv |
| | iemarenqtt qkgqknsrer |
| 781 | mkrieegike lgsqilkehp ventqlqnek lylyylangr |
| | dmyvdqeldi nrlsdydvdh |
| 841 | ivpqsflkdd sidnkvltrs dknrgksdnv pseevvkkmk |
| | nywrqllnak litqrkfdnl |
| 901 | tkaergglse ldkagfikrq lvetrqitkh vaqildsrmn |
| | tkydendkli revkvitlks |
| 961 | klvsdfrkdf qfykvreinn yhhahdayln avvgtalikk |
| | ypklesefvy gdykvydvrk |
| 1021 | miakseqeig katakyffys nimnffktei tlangeirkr |
| | plietngetg eivwdkgrdf |
| 1081 | atvrkvlsmp qvnivkktev qtggfskesi lpkrnsdkli |
| | arkkdwdpkk yggfdsptva |
| 1141 | ysvlvvakve kgkskklksv kellgitime rssfeknpid |
| | fleakgykev kkdliiklpk |
| 1201 | yslfelengr krmlasagel qkgnelalps kyvnflylas |
| | hyeklkgspe dneqkqlfve |
| 1261 | qhkhyldeii eqisefskrv iladanldkv lsaynkhrdk |
| | pireqaenii hlftltnlga |
| 1321 | paafkyfdtt idrkrytstk evldatlihq sitglyetri |
| | dlsqlggd. |

### Use of Nucleobase Editors

[0836] The correction of point mutations in disease-associated genes and alleles provides new strategies for gene correction with applications in therapeutics and basic research.

[0837] The present disclosure provides methods for the treatment of a subject diagnosed with a disease associated with or caused by a point mutation that can be corrected by a base editor system provided herein. For example, in some embodiments, a method is provided that comprises administering to a subject having such a disease, e.g., a disease caused by a genetic mutation, an effective amount of a nucleobase editor (e.g., an adenosine deaminase base editor) that corrects the point mutation in the disease associated gene. The present disclosure provides methods for the treatment of GSD1a that are associated with or caused by a point mutation that can be corrected by deaminase mediated gene editing. Suitable diseases that can be treated with the strategies and fusion proteins provided herein will be apparent to those of skill in the art based on the instant disclosure.

[0838] Provided herein are methods of using a base editor or base editor system for editing a nucleobase in a target nucleotide sequence associated with a disease or disorder (e.g., GSD1a). In some embodiments, the activity of the base editor (e.g., comprising an adenosine deaminase and a Cas9 domain) results in a correction of the point mutation. In some embodiments, the target DNA sequence comprises a G→A point mutation associated with a disease or disorder, and deamination of the mutant A base results in a sequence that is not associated with a disease or disorder. In some embodiments, the target DNA sequence comprises a T→C point mutation associated with a disease or disorder, and the deamination of the mutant C base results in a sequence that is not associated with a disease or disorder.

[0839] In some embodiments, the deaminases (e.g., adenosine deaminase) provided herein are capable of deaminating a deoxyadenosine residue of DNA. Other aspects of the disclosure provide fusion proteins that comprise a deaminase (e.g., an adenosine deaminase) and a domain (e.g., a Cas9) capable of binding to a specific nucleotide sequence. For example, adenosine can be converted to an inosine residue, which typically base pairs with a cytosine residue. Such fusion proteins are useful inter alia for targeted editing of nucleic acid sequences. Such fusion proteins can be used for targeted editing of DNA in vitro, e.g., for the generation of mutant cells or animals; for the introduction of targeted mutations, e.g., for the correction of genetic defects in cells ex vivo, e.g., in cells obtained from a subject that are subsequently re-introduced into the same or another subject; and for the introduction of targeted mutations in vivo, e.g., the correction of genetic defects or the introduction of deactivating mutations in disease-associated genes in a G to A, or a T to C to mutation can be treated using the nucleobase editors provided herein. The present disclosure provides fusion proteins, nucleic acids, vectors, compositions, methods, kits, systems, etc. that utilize the deaminases and nucleobase editors.

### Use of Nucleobase Editors to Target Nucleotides in the G6PC Gene

[0840] The suitability of nucleobase editors that target a nucleotide in the G6PC gene is evaluated as described herein. In one embodiment, a single cell of interest is transfected, transduced, or otherwise modified with a nucleic acid molecule or molecules encoding a nucleobase editor described herein together with a small amount of a vector encoding a reporter (e.g., GFP). These cells can be immortalized human cell lines, such as 293T, K562 or U20S. Alternatively, primary human cells may be used. Cells may also be obtained from a subject or individual, such as from tissue biopsy, surgery, blood, plasma, serum, or other biological fluid. Such cells may be relevant to the eventual cell target,

[0841] Delivery may be performed using a viral vector as further described below. In one embodiment, transfection may be performed using lipid transfection (such as Lipofectamine, Metafectamine, or Fugene) or by electroporation. Following transfection, expression of GFP can be determined either by fluorescence microscopy or by flow cytometry to confirm consistent and high levels of transfection. These preliminary transfections can comprise different nucleobase editors to determine which combinations of editors give the greatest activity.

[0842] The activity of the nucleobase editor is assessed as described herein, i.e., by sequencing the target gene to detect alterations in the target sequence. For Sanger sequencing, purified PCR amplicons are cloned into a plasmid backbone, transformed, miniprepped and sequenced with a single primer. Sequencing may also be performed using next generation sequencing techniques. When using next generation sequencing, amplicons may be 300-500 bp with the intended cut site placed asymmetrically. Following PCR, next generation sequencing adapters and barcodes (for example Illumina multiplex adapters and indexes) may be added to the ends of the amplicon, e.g., for use in high throughput sequencing (for example on an Illumina MiSeq).

[0843] The fusion proteins that induce the greatest levels of target specific alterations in initial tests can be selected for further evaluation.

[0844] In particular embodiments, the nucleobase editors are used to target polynucleotides of interest. In one embodiment, a nucleobase editor as described herein is delivered to cells (e.g., hepatocytes) in conjunction with a guide RNA that is used to target a nucleic acid sequence, e.g., a G6PC polynucleotide harboring GSD1a-associated mutations, thereby altering the target gene, i.e., G6PC.

[0845] In some embodiments, a base editor is targeted by a guide RNA to introduce one or more edits to the sequence of a gene of interest (e.g. G6PC). In some embodiments, the one or more alterations are introduced into the glucose-6-phosphatase (G6PC) gene. In some embodiments the one or more alterations is R83C. In some embodiments, the one or more alterations is Q347X. In some embodiments, the alteration is introduced into a representative Homo sapiens G6PC protein, found under NCBI Reference Sequence No. AAA16222.1. In some embodiments, the alteration is introduced into a representative Homo sapiens G6PC nucleic acid sequence, found under GenBank Reference Sequence No. U01120.1.

### Methods for Editing Nucleic Acids

[0846] Some aspects of the disclosure provide methods for editing a nucleic acid. In some embodiments, the method is a method for editing a nucleobase of a nucleic acid (e.g., a base pair of a double-stranded DNA sequence). In some embodiments, the method comprises the steps of: a) contacting a target region of a nucleic acid (e.g., a double-stranded DNA sequence) with a complex comprising a base editor (e.g., a Cas9 domain fused to an adenosine deaminase) and a guide nucleic acid (e.g., gRNA), wherein the target region comprises a targeted nucleobase pair, b) inducing strand separation of said target region, c) converting a first nucleobase of said target nucleobase pair in a single strand of the target region to a second nucleobase, and d) cutting no more than one strand of said target region, where a third nucleobase complementary to the first nucleobase base is replaced by a fourth nucleobase complementary to the second nucleobase. In some embodiments, the method results in less than 20% indel formation in the nucleic acid. It should be appreciated that in some embodiments, step b is omitted. In some embodiments, the method results in less than 19% 1, 8% 1, 6% 1, 4% 1, 2% 1, 0%, 8%, 6%, 4%, 2%, 1%, 0.5%, 0.2%, or less than 0.1% indel formation. In some embodiments, the method further comprises replacing the second nucleobase with a fifth nucleobase that is complementary to the fourth nucleobase, thereby generating an intended edited base pair (e.g., C·G to T·A). In some embodiments, at least 5% of the intended base pairs are edited. In some embodiments, at least 10%, 15%, 20%, 25%, 30%, 35%, 40%, 45%, or 50% of the intended base pairs are edited.

[0847] In some embodiments, the ratio of intended products to unintended products in the target nucleotide is at least 2:1, 5:1, 10:1, 20:1, 30:1, 40:1, 50:1, 60:1, 70:1, 80:1, 90:1, 100:1, or 200:1, or more. In some embodiments, the ratio of intended mutation to indel formation is greater than 1:1, 10:1, 50:1, 100:1, 500:1, or 1000:1, or more. In some embodiments, the cut single strand (nicked strand) is hybridized to the guide nucleic acid. In some embodiments, the cut single strand is opposite to the strand comprising the first nucleobase. In some embodiments, the base editor comprises a Cas9 domain. In some embodiments, the base editor protects or binds the non-edited strand. In some embodiments, the base editor comprises nickase activity. In some embodiments, the intended edited base pair is upstream of a PAM site. In some embodiments, the intended edited base pair is 1, 2, 3, 4, 5, 6, 7, 8, 9, 10, 11, 12, 13, 14, 15, 16, 17, 18, 19, or 20 nucleotides upstream of the PAM site. In some embodiments, the intended edited base pair is downstream of a PAM site. In some embodiments, the intended edited base pair is 1, 2, 3, 4, 5, 6, 7, 8, 9, 10, 11, 12, 13, 14, 15, 16, 17, 18, 19, or 20 nucleotides downstream stream of the PAM site. In some embodiments, the method does not require a canonical (e.g., NGG) PAM site. In some embodiments, the nucleobase editor comprises a linker. In some embodiments, the linker is 1-25 amino acids in length. In some embodiments, the linker is 5-20 amino acids in length. In some embodiments, linker is 10, 11, 12, 13, 14, 15, 16, 17, 18, 19, or 20 amino acids in length. In one embodiment, the linker is 32 amino acids in length. In another embodiment, a “long linker” is at least about 60 amino acids in length. In other embodiments, the linker is between about 3-100 amino acids in length. In some embodiments, the target region comprises a target window, wherein the target window comprises the target nucleobase pair. In some embodiments, the target window comprises 1-10 nucleotides. In some embodiments, the target window is 1-9, 1-8, 1-7, 1-6, 1-5, 1-4, 1-3, 1-2, or 1 nucleotides in length. In some embodiments, the target window is 1, 2, 3, 4, 5, 6, 7, 8, 9, 10, 11, 12, 13, 14, 15, 16, 17, 18, 19, or 20 nucleotides in length. In some embodiments, the intended edited base pair is within the target window. In some embodiments, the target window comprises the intended edited base pair. In some embodiments, the method is performed using any of the base editors provided herein. In some embodiments, a target window is a methylation window.

[0848] In some embodiments, the disclosure provides methods for editing a nucleotide. In some embodiments, the disclosure provides a method for editing a nucleobase pair of a double-stranded DNA sequence. In some embodiments, the method comprises a) contacting a target region of the double-stranded DNA sequence with a complex comprising a base editor and a guide nucleic acid (e.g., gRNA), where the target region comprises a target nucleobase pair, b) inducing strand separation of said target region, c) converting a first nucleobase of said target nucleobase pair in a single strand of the target region to a second nucleobase, d) cutting no more than one strand of said target region, wherein a third nucleobase complementary to the first nucleobase base is replaced by a fourth nucleobase complementary to the second nucleobase, and the second nucleobase is replaced with a fifth nucleobase that is complementary to the fourth nucleobase, thereby generating an intended edited base pair, wherein the efficiency of generating the intended edited base pair is at least 5%. It should be appreciated that in some embodiments, step b is omitted. In some embodiments, at least 5% of the intended base pairs are edited. In some embodiments, at least 10%, 15%, 20%, 25%, 30%, 35%, 40%, 45%, or 50% of the intended base pairs are edited. In some embodiments base editing by a method described herein may have a base conversion efficiency of at least 10% at any particular gene site. In some embodiments, base editing by a method described herein may have a base conversion efficiency of at least 20%, at least 25%, at least 30%, at least 35%, at least 40%, at least 45%, at least 50% at least 55% or at least 60%, at least 65%, at least 70%, at least 75%, at least 80%, at least 85%, at least 90%, or at least 95%, 96%, 97%, 98% or at least 99% at any particular gene site. In some embodiments base editing by a method described herein may have a base conversion efficiency of at least 70% at any particular gene site. In some embodiments base editing by a method described herein may have a base conversion efficiency of at least 80% at any particular gene site. In some embodiments base editing by a method described herein may have a base conversion efficiency of at least 90% at any particular gene site.

[0849] In some embodiments, the method causes less than 19%, 18%, 16%, 14%, 12%, 10%, 8%, 6%, 4%, 2%, 1%, 0.5%, 0.2%, or less than 0.1% indel formation. In some embodiments, the ratio of intended product to unintended products at the target nucleotide is at least 2:1, 5:1, 10:1, 20:1, 30:1, 40:1, 50:1, 60:1, 70:1, 80:1, 90:1, 100:1, or 200:1, or more. In some embodiments, the ratio of intended mutation to indel formation is greater than 1:1, 10:1, 50:1, 100:1, 500:1, or 1000:1, or more. In some embodiments, the cut single strand is hybridized to the guide nucleic acid. In some embodiments, the cut single strand is opposite to the strand comprising the first nucleobase. In some embodiments, the nucleobase editor comprises nickase activity. In some embodiments, the intended edited base pair is upstream of a PAM site. In some embodiments, the intended edited base pair is 1, 2, 3, 4, 5, 6, 7, 8, 9, 10, 11, 12, 13, 14, 15, 16, 17, 18, 19, or 20 nucleotides upstream of the PAM site. In some embodiments, the intended edited base pair is downstream of a PAM site. In some embodiments, the intended edited base pair is 1, 2, 3, 4, 5, 6, 7, 8, 9, 10, 11, 12, 13, 14, 15, 16, 17, 18, 19, or 20 nucleotides downstream stream of the PAM site. In some embodiments, the method does not require a canonical (e.g., NGG) PAM site. In some embodiments, the nucleobase editor comprises a linker. In some embodiments, the linker is 1-25 amino acids in length. In some embodiments, the linker is 5-20 amino acids in length. In some embodiments, the linker is 10, 11, 12, 13, 14, 15, 16, 17, 18, 19, or 20 amino acids in length. e.g., In some embodiments, the target region comprises a target window, wherein the target window comprises the target nucleobase pair. In some embodiments, the target window comprises 1-10 nucleotides. In some embodiments, the target window is 1-9, 1-8, 1-7, 1-6, 1-5, 1-4, 1-3, 1-2, or 1 nucleotides in length. In some embodiments, the target window is 1, 2, 3, 4, 5, 6, 7, 8, 9, 10, 11, 12, 13, 14, 15, 16, 17, 18, 19, or 20 nucleotides in length. In some embodiments, the intended edited base pair occurs within the target window. In some embodiments, the target window comprises the intended edited base pair. In some embodiments, the nucleobase editor is any one of the base editors provided herein.

### Expression of Fusion Proteins in a Host Cell

[0850] Fusion proteins of the disclosure comprising an adenosine deaminase variant may be expressed in virtually any host cell of interest, including but not limited to, bacteria, yeast, fungi, insects, plants, and animal cells, using routine methods known to the skilled artisan. For example, a DNA encoding an adenosine deaminase of the disclosure can be cloned by designing suitable primers for the upstream and downstream of CDS based on the cDNA sequence. The cloned DNA may be directly, or after digestion with a restriction enzyme when desired, or after addition of a suitable linker and/or a nuclear localization signal ligated with a DNA encoding one or more additional components of a base editing system. The base editing system is translated in a host cell to form a complex.

[0851] A DNA encoding a protein domain described herein can be obtained by chemically synthesizing the DNA, or by connecting synthesized partly overlapping oligoDNA short chains by utilizing the PCR method and the Gibson Assembly method to construct a DNA encoding the full length thereof. The advantage of constructing a full-length DNA by chemical synthesis or a combination of PCR method or Gibson Assembly method is that the codon to be used can be designed in CDS full-length according to the host into which the DNA is introduced. In the expression of a heterologous DNA, the protein expression level is expected to increase by converting the DNA sequence thereof to a codon highly frequently used in the host organism. As the data of codon use frequency in host to be used, for example, the genetic code use frequency database (kazusa.or.jp/codon/index.html) disclosed in the home page of Kazusa DNA Research Institute can be used, or documents showing the codon use frequency in each host may be referred to. By reference to the obtained data and the DNA sequence to be introduced, codons showing low use frequency in the host from among those used for the DNA sequence may be converted to a codon coding the same amino acid and showing high use frequency.

[0852] An expression vector containing a DNA encoding a nucleic acid sequence-recognizing module and/or a nucleic acid base converting enzyme can be produced, for example, by linking the DNA to the downstream of a promoter in a suitable expression vector. In some embodiments, animal cell expression plasmids (e.g., pA1-11, pXT1, pRc/CMV, pRc/RSV, pcDNAI/Neo), and animal virus vectors such as retrovirus, vaccinia virus, adenovirus, and the like are used. In other embodiments, Escherichia coli-derived plasmids (e.g., pBR322, pBR325, pUC12, pUC13); Bacillus subtilis-derived plasmids (e.g., pUB110, pTP5, pC194); yeast-derived plasmids (e.g., pSH19, pSH15); insect cell expression plasmids (e.g., pFast-Bac); bacteriophages such as lambda phage and the like; insect virus vectors such as baculovirus and the like (e.g., BmNPV, AcNPV); and the like are used.

[0853] In some embodiments, any promoter appropriate for gene expression in a given host can be used. In a conventional method using DSB, since the survival rate of the host cell sometimes decreases markedly due to the toxicity, it is desirable to increase the number of cells by the start of the induction by using an inductive promoter. However, since sufficient cell proliferation can also be afforded by expressing the nucleic acid-modifying enzyme complex of the present disclosure, a constitution promoter can also be used without limitation.

[0854] For example, without limitation, when the host is an animal cell, SRα promoter, SV40 promoter, LTR promoter, CMV (cytomegalovirus) promoter, RSV (Rous sarcoma virus) promoter, MoMuLV (Moloney mouse leukemia virus) LTR, HSV-TK (simple herpes virus thymidine kinase) promoter and the like are used. Of these, CMV promoter, SRα promoter and the like are suitable for use.

[0855] In addition to those mentioned above, an expression vector containing an enhancer, splicing signal, terminator, polyA addition signal, a selection marker such as drug resistance gene, auxotrophic complementary gene and the like, replication origin and the like, on demand can be used.

[0856] An RNA encoding a protein domain described herein can be prepared, for example, by transcription to mRNA in an in vitro transcription system known per se by using a vector encoding DNA encoding the above-mentioned nucleic acid sequence-recognizing module and/or a nucleic acid base converting enzyme as a template.

[0857] A fusion protein of the disclosure can be intracellularly expressed by introducing an expression vector containing a DNA encoding a nucleic acid sequence-recognizing module and/or a nucleic acid base converting enzyme into a host cell, and culturing the host cell.

[0858] As the animal cell, cell lines such as monkey COS-7 cell, monkey Vero cell, Chinese hamster ovary (CHO) cell, dhfr gene-deficient CHO cell, mouse L cell, mouse AtT-20 cell, mouse myeloma cell, rat GH3 cell, human FL cell and the like, pluripotent stem cells such as iPS cell, ES cell and the like of human and other mammals, and primary cultured cells prepared from various tissues are used. Furthermore, zebrafish embryo, Xenopus oocyte and the like can also be used.

[0859] All the above-mentioned host cells may be haploid (monoploid), or polyploid (e.g., diploid, triploid, tetraploid and the like). In the conventional mutation introduction methods, mutation is, in principle, introduced into only one homologous chromosome to produce a hetero gene type. Therefore, desired phenotype is not expressed unless dominant mutation occurs, and homozygousness inconveniently requires labor and time. In contrast, according to the present disclosure, since mutation can be introduced into any allele on the homologous chromosome in the genome, the desired phenotype can be expressed in a single generation even in the case of recessive mutation, which is extremely useful since the problem of the conventional method can be solved.

[0860] An expression vector can be introduced by a known method (e.g., lysozyme method, competent method, PEG method, CaCl₂) coprecipitation method, electroporation method, the microinjection method, the particle gun method, lipofection method, Agrobacterium method and the like) according to the kind of the host.

[0861] A vector can be introduced into an animal cell according to the methods described in, for example, Cell Engineering additional volume 8, New Cell Engineering Experiment Protocol, 263-267 (1995) (published by Shujunsha), and Virology, 52, 456 (1973). A cell comprising a vector can be cultured according to a known method according to the type of host.

[0862] As a medium for culturing an animal cell, for example, minimum essential medium (MEM) containing about 5 to about 20% of fetal bovine serum (Science, 122, 501 (1952)), Dulbecco's modified Eagle medium (DMEM) (Virology, 8, 396 (1959)), RPMI 1640 medium (The Journal of the American Medical Association, 199, 519 (1967)), 199 medium (Proceeding of the Society for the Biological Medicine, 73, 1 (1950)) and the like are used. The pH of the medium is preferably about 6 to about 8. The culture is generally maintained at about 30° C. to about 40° C. Where necessary, aeration and stirring may be performed.

[0863] When a higher eukaryotic cell, such as animal cell, is used as a host cell, a DNA encoding a base editing system of the present disclosure (e.g., comprising an adenosine deaminase variant) is introduced into a host cell under the regulation of an inducible promoter (e.g., metallothionein promoter (induced by heavy metal ion), heat shock protein promoter (induced by heat shock), Tet-ON/Tet-OFF system promoter (induced by addition or removal of tetracycline or a derivative thereof), steroid-responsive promoter (induced by steroid hormone or a derivative thereof) etc.), the induction substance is added to the medium (or removed from the medium) at an appropriate stage to induce expression of the nucleic acid-modifying enzyme complex, culture is performed for a given period to carry out a base editing and, introduction of a mutation into a target gene, transient expression of the base editing system can be realized.

[0864] Alternatively, the above-mentioned inductive promoter can also be utilized as a vector removal mechanism when higher eukaryotic cells, such animal cells and the like, are used as host cells. That is, a vector is mounted with a replication origin that functions in a host cell, and a nucleic acid encoding a protein necessary for replication (e.g., SV40 on and large T antigen, oriP and EBNA-1 etc. for animal cells) of the expression of the nucleic acid encoding the protein is regulated by the above-mentioned inducible promoter. As a result, while the vector is autonomously replicatable in the presence of an induction substance, when the induction substance is removed, autonomous replication is not available, and the vector naturally falls off along with cell division (autonomous replication is not possible by the addition of tetracycline and doxycycline in Tet-OFF system vector).

### Precise Correction of Pathogenic Mutations

[0865] In some embodiments, the intended mutation is a precise correction of a pathogenic mutation or a disease-causing mutation. The pathogenic mutation can be a pathogenic single nucleotide polymorphism (SNP) or be caused by a SNP. For example, the pathogenic mutation can be an amino acid change in a protein encoded by a gene. In another example, the pathogenic mutation can be a pathogenic SNP in a gene. The precise correction can be to revert the pathogenic mutation back to its wild-type state. In some embodiments, the pathogenic mutation is a G→A point mutation associated with a disease or disorder, and wherein the deamination of the mutant A base with an A-to-G base editor (ABE) results in a sequence that is not associated with a disease or disorder. In some embodiments, the pathogenic mutation is a C→T point mutation. The C→T point mutation can be corrected, for example, by targeting an A-to-G base editor (ABE) to the opposite strand and editing the complement A of the pathogenic T nucleobase. A base editor can be targeted to a pathogenic SNP, or to the complement of the pathogenic SNP. The nomenclature of the description of pathogenic or disease-causing mutations and other sequence variations are described in den Dunnen, J. T. and Antonarakis, S. E., “Mutation Nomenclature Extensions and Suggestions to Describe Complex Mutations: A Discussion.” Human Mutation 15:712 (2000), the entire contents of which is hereby incorporated by reference.

[0866] In a particular embodiment, the disease or disorder is Glycogen Storage Disease Type 1 (GSD1 or Von Gierke Disease). In some embodiments, the disease or disorder is GSD1a. In some embodiments, the pathogenic mutation is in the G6PC gene. In some embodiments, the pathogenic mutation is Q347X of the G6PC gene. In some embodiments, the pathogenic mutation is R83C of the G6PC gene.

### Pharmaceutical Compositions

[0867] In some aspects, a pharmaceutical composition is provided, which comprises any of the base editors, fusion proteins, or the fusion protein-guide polynucleotide complexes described herein.

[0868] The pharmaceutical compositions as described herein can be prepared in accordance with known techniques. See, e.g., Remington, The Science And Practice of Pharmacy (21st ed. 2005). In some embodiments, the pharmaceutical composition comprises a pharmaceutically acceptable carrier. Suitable pharmaceutically acceptable carriers generally comprise inert substances that aid in administering the pharmaceutical composition to a subject, aid in processing the pharmaceutical compositions into deliverable preparations, or aid in storing the pharmaceutical composition prior to administration. Pharmaceutically acceptable carriers can include agents that can stabilize, optimize or otherwise alter the form, consistency, viscosity, pH, pharmacokinetics, solubility of the formulation. Such agents include buffering agents, wetting agents, emulsifying agents, diluents, encapsulating agents, and skin penetration enhancers. For example, carriers can include, but are not limited to, saline, buffered saline, dextrose, arginine, sucrose, water, glycerol, ethanol, sorbitol, dextran, sodium carboxymethyl cellulose, and combinations thereof.

[0869] Some nonlimiting examples of materials which can serve as pharmaceutically-acceptable carriers include: (1) sugars, such as lactose, glucose and sucrose; (2) starches, such as corn starch and potato starch; (3) cellulose, and its derivatives, such as sodium carboxymethyl cellulose, methylcellulose, ethyl cellulose, microcrystalline cellulose and cellulose acetate; (4) powdered tragacanth; (5) malt; (6) gelatin; (7) lubricating agents, such as magnesium stearate, sodium lauryl sulfate and talc; (8) excipients, such as cocoa butter and suppository waxes; (9) oils, such as peanut oil, cottonseed oil, safflower oil, sesame oil, olive oil, corn oil and soybean oil; (10) glycols, such as propylene glycol; (11) polyols, such as glycerin, sorbitol, mannitol and polyethylene glycol (PEG); (12) esters, such as ethyl oleate and ethyl laurate; (13) agar; (14) buffering agents, such as magnesium hydroxide and aluminum hydroxide; (15) alginic acid; (16) pyrogen-free water; (17) isotonic saline; (18) Ringer's solution; (19) ethyl alcohol; (20) pH buffered solutions; (21) polyesters, polycarbonates and/or polyanhydrides; (22) bulking agents, such as polypeptides and amino acids (23) serum alcohols, such as ethanol; and (23) other non-toxic compatible substances employed in pharmaceutical formulations. Wetting agents, coloring agents, release agents, coating agents, sweetening agents, flavoring agents, perfuming agents, preservative and antioxidants can also be present in the formulation.

[0870] Pharmaceutical compositions can comprise one or more pH buffering compounds to maintain the pH of the formulation at a predetermined level that reflects physiological pH, such as in the range of about 5.0 to about 8.0. The pH buffering compound used in the aqueous liquid formulation can be an amino acid or mixture of amino acids, such as histidine or a mixture of amino acids such as histidine and glycine. Alternatively, the pH buffering compound is preferably an agent which maintains the pH of the formulation at a predetermined level, such as in the range of about 5.0 to about 8.0, and which does not chelate calcium ions. Illustrative examples of such pH buffering compounds include, but are not limited to, imidazole and acetate ions. The pH buffering compound may be present in any amount suitable to maintain the pH of the formulation at a predetermined level.

[0871] Pharmaceutical compositions can also contain one or more osmotic modulating agents, i.e., a compound that modulates the osmotic properties (e.g., tonicity, osmolality, and/or osmotic pressure) of the formulation to a level that is acceptable to the blood stream and blood cells of recipient individuals. The osmotic modulating agent can be an agent that does not chelate calcium ions. The osmotic modulating agent can be any compound known or available to those skilled in the art that modulates the osmotic properties of the formulation. One skilled in the art may empirically determine the suitability of a given osmotic modulating agent for use in the inventive formulation. Illustrative examples of suitable types of osmotic modulating agents include, but are not limited to: salts, such as sodium chloride and sodium acetate; sugars, such as sucrose, dextrose, and mannitol; amino acids, such as glycine; and mixtures of one or more of these agents and/or types of agents. The osmotic modulating agent(s) may be present in any concentration sufficient to modulate the osmotic properties of the formulation.

[0872] In some embodiments, the pharmaceutical composition is formulated for delivery to a subject, e.g., for gene editing. Suitable routes of administrating the pharmaceutical composition described herein include, without limitation: topical, subcutaneous, suboccipital, transdermal, intradermal, intralesional, intraarticular, intraperitoneal, intravesical, transmucosal, gingival, intradental, intracochlear, transtympanic, intraorgan, epidural, intrathecal, intramuscular, intravenous, intravascular, intraosseus, periocular, intratumoral, intracerebral, and intracerebroventricular administration.

[0873] In some embodiments, the pharmaceutical composition described herein is administered locally to a diseased site. In some embodiments, the pharmaceutical composition described herein is administered to a subject by injection, by means of a catheter, by means of a suppository, or by means of an implant, the implant being of a porous, non-porous, or gelatinous material, including a membrane, such as a sialastic membrane, or a fiber.

[0874] In other embodiments, the pharmaceutical composition described herein is delivered in a controlled release system. In one embodiment, a pump can be used (see, e.g., Langer, 1990, Science 249: 1527-1533; Sefton, 1989, CRC Crit. Ref. Biomed. Eng. 14:201; Buchwald et al., 1980, Surgery 88:507; Saudek et al., 1989, N. Engl. J. Med. 321:574). In another embodiment, polymeric materials can be used. (See, e.g., Medical Applications of Controlled Release (Langer and Wise eds., CRC Press, Boca Raton, Fla., 1974); Controlled Drug Bioavailability, Drug Product Design and Performance (Smolen and Ball eds., Wiley, New York, 1984); Ranger and Peppas, 1983, Macromol. Sci. Rev. Macromol. Chem. 23:61. See also Levy et al., 1985, Science 228: 190; During et al., 1989, Ann. Neurol. 25:351; Howard et al., 1989, J. Neurosurg. 71: 105.) Other controlled release systems are discussed, for example, in Langer, supra.

[0875] In some embodiments, the pharmaceutical composition is formulated in accordance with routine procedures as a composition adapted for intravenous or subcutaneous administration to a subject, e.g., a human. In some embodiments, pharmaceutical composition for administration by injection are solutions in sterile isotonic use as solubilizing agent and a local anesthetic such as lignocaine to ease pain at the site of the injection. Generally, the ingredients are supplied either separately or mixed together in unit dosage form, for example, as a dry lyophilized powder or water free concentrate in a hermetically sealed container such as an ampoule or sachette indicating the quantity of active agent. Where the pharmaceutical is to be administered by infusion, it can be dispensed with an infusion bottle containing sterile pharmaceutical grade water or saline. Where the pharmaceutical composition is administered by injection, an ampoule of sterile water for injection or saline can be provided so that the ingredients can be mixed prior to administration.

[0876] A pharmaceutical composition for systemic administration can be a liquid, e.g., sterile saline, lactated Ringer's or Hank's solution. In addition, the pharmaceutical composition can be in solid forms and re-dissolved or suspended immediately prior to use. Lyophilized forms are also contemplated. The pharmaceutical composition can be contained within a lipid particle or vesicle, such as a liposome or microcrystal, which is also suitable for parenteral administration. The particles can be of any suitable structure, such as unilamellar or plurilamellar, so long as compositions are contained therein. Compounds can be entrapped in “stabilized plasmid-lipid particles” (SPLP) containing the fusogenic lipid dioleoylphosphatidylethanolamine (DOPE), low levels (5-10 mol %) of cationic lipid, and stabilized by a polyethyleneglycol (PEG) coating (Zhang Y. P. et al., Gene Ther. 1999, 6: 1438-47). Positively charged lipids such as N-[1-(2,3-dioleoyloxi)propyl]-N,N,N-trimethyl-amoniummethylsulfate, or “DOTAP,” are particularly preferred for such particles and vesicles. The preparation of such lipid particles is well known. See, e.g., U.S. Pat. Nos. 4,880,635; 4,906,477; 4,911,928; 4,917,951; 4,920,016; and 4,921,757; each of which is incorporated herein by reference.

[0877] The pharmaceutical composition described herein can be administered or packaged as a unit dose, for example. The term “unit dose” when used in reference to a pharmaceutical composition of the present disclosure refers to physically discrete units suitable as unitary dosage for the subject, each unit containing a predetermined quantity of active material calculated to produce the desired therapeutic effect in association with the required diluent; i.e., carrier, or vehicle.

[0878] Further, the pharmaceutical composition can be provided as a pharmaceutical kit comprising (a) a container containing a compound as described herein in lyophilized form and (b) a second container containing a pharmaceutically acceptable diluent (e.g., sterile used for reconstitution or dilution of the lyophilized compound described herein. Optionally associated with such container(s) can be a notice in the form prescribed by a governmental agency regulating the manufacture, use or sale of pharmaceuticals or biological products, which notice reflects approval by the agency of manufacture, use, or sale for human administration.

[0879] In another aspect, an article of manufacture containing materials useful for the treatment of the diseases described above is included. In some embodiments, the article of manufacture comprises a container and a label. Suitable containers include, for example, bottles, vials, syringes, and test tubes. The containers can be formed from a variety of materials such as glass or plastic. In some embodiments, the container holds a composition that is effective for treating a disease described herein and can have a sterile access port. For example, the container can be an intravenous solution bag or a vial having a stopper pierceable by a hypodermic injection needle. The active agent in the composition is a compound as described and provided herein. In some embodiments, the label on or associated with the container indicates that the composition is used for treating the disease of choice. The article of manufacture can further comprise a second container comprising a pharmaceutically-acceptable buffer, such as phosphate-buffered saline, Ringer's solution, or dextrose solution. It can further include other materials desirable from a commercial and user standpoint, including other buffers, diluents, filters, needles, syringes, and package inserts with instructions for use.

[0880] In some embodiments, any of the fusion proteins, gRNAs, and/or complexes described herein are provided as part of a pharmaceutical composition. In some embodiments, the pharmaceutical composition comprises any of the fusion proteins provided herein. In some embodiments, the pharmaceutical composition comprises any of the complexes provided herein. In some embodiments, the pharmaceutical composition comprises a ribonucleoprotein complex comprising an RNA-guided nuclease (e.g., Cas9) that forms a complex with a gRNA and a cationic lipid. In some embodiments pharmaceutical composition comprises a gRNA, a nucleic acid programmable DNA binding protein, a cationic lipid, and a pharmaceutically acceptable excipient. Pharmaceutical compositions can optionally comprise one or more additional therapeutically active substances.

[0881] In some embodiments, compositions provided herein are administered to a subject, for example, to a human subject, in order to effect a targeted genomic modification within the subject. In some embodiments, cells are obtained from the subject and contacted with any of the pharmaceutical compositions provided herein. In some embodiments, cells removed from a subject and contacted ex vivo with a pharmaceutical composition are re-introduced into the subject, optionally after the desired genomic modification has been effected or detected in the cells. Methods of delivering pharmaceutical compositions comprising nucleases are known, and are described, for example, in U.S. Pat. Nos. 6,453,242; 6,503,717; 6,534,261; 6,599,692; 6,607,882; 6,689,558; 6,824,978; 6,933,113; 6,979,539; 7,013,219; and 7,163,824, the disclosures of all of which are incorporated by reference herein in their entireties. Although the descriptions of pharmaceutical compositions provided herein are principally directed to pharmaceutical compositions which are suitable for administration to humans, it will be understood by the skilled artisan that such compositions are generally suitable for administration to animals or organisms of all sorts, for example, for veterinary use.

[0882] Modification of pharmaceutical compositions suitable for administration to humans in order to render the compositions suitable for administration to various animals is well understood, and the ordinarily skilled veterinary pharmacologist can design and/or perform such modification with merely ordinary, if any, experimentation. Subjects to which administration of the pharmaceutical compositions is contemplated include, but are not limited to, humans and/or other primates; mammals, domesticated animals, pets, and commercially relevant mammals such as cattle, pigs, horses, sheep, cats, dogs, mice, and/or rats; and/or birds, including commercially relevant birds such as chickens, ducks, geese, and/or turkeys.

[0883] Formulations of the pharmaceutical compositions described herein can be prepared by any method known or hereafter developed in the art of pharmacology. In general, such preparatory methods include the step of bringing the active ingredient(s) into association with an excipient and/or one or more other accessory ingredients, and then, if necessary and/or desirable, shaping and/or packaging the product into a desired single- or multi-dose unit. Pharmaceutical formulations can additionally comprise a pharmaceutically acceptable excipient, which, as used herein, includes any and all solvents, dispersion media, diluents, or other liquid vehicles, dispersion or suspension aids, surface active agents, isotonic agents, thickening or emulsifying agents, preservatives, solid binders, lubricants and the like, as suited to the particular dosage form desired. Remington's The Science and Practice of Pharmacy, 21st Edition, A. R. Gennaro (Lippincott, Williams & Wilkins, Baltimore, MD, 2006; incorporated in its entirety herein by reference) discloses various excipients used in formulating pharmaceutical compositions and known techniques for the preparation thereof. See also PCT application PCT/US2010/055131 (Publication number WO2011/053982 A8, filed Nov. 2, 2010), incorporated in its entirety herein by reference, for additional suitable methods, reagents, excipients and solvents for producing pharmaceutical compositions comprising a nuclease.

[0884] Except insofar as any conventional excipient medium is incompatible with a substance or its derivatives, such as by producing any undesirable biological effect or otherwise interacting in a deleterious manner with any other component(s) of the pharmaceutical composition, its use is contemplated to be within the scope of this disclosure.

[0885] The compositions, as described above, can be administered in effective amounts. The effective amount will depend upon the mode of administration, the particular condition being treated, and the desired outcome. It may also depend upon the stage of the condition, the age and physical condition of the subject, the nature of concurrent therapy, if any, and like factors well-known to the medical practitioner. For therapeutic applications, it is that amount sufficient to achieve a medically desirable result.

[0886] In some embodiments, compositions in accordance with the present disclosure can be used for treatment of any of a variety of diseases, disorders, and/or conditions.

### Methods of Treating Glycogen Storage Disease Type 1a (GSD1a)

[0887] Provided also are methods of treating Glycogen Storage Disease Type 1a (GSD1a) and/or the genetic mutations in G6PC that cause GSD1a that comprise administering to a subject (e.g., a mammal, such as a human) a therapeutically effective amount of a pharmaceutical composition that comprises a polynucleotide encoding a base editor system (e.g., Adenosine Deaminase Base Editor (ABE) and gRNA) described herein. In some embodiments, the base editor is a fusion protein that comprises a polynucleotide programmable DNA binding domain and an adenosine deaminase domain. A cell of the subject is transduced with the base editor and one or more guide polynucleotides that target the base editor to effect an A·T to G·C alteration of a nucleic acid sequence containing mutations in the G6PC gene.

[0888] The methods herein include administering to the subject (including a subject identified as being in need of such treatment, or a subject suspected of being at risk of disease and in need of such treatment) an effective amount of a composition described herein. Identifying a subject in need of such treatment can be in the judgment of a subject or a health care professional and can be subjective (e.g., opinion) or objective (e.g., measurable by a test or diagnostic method).

[0889] The therapeutic methods, in general, comprise administration of a therapeutically effective amount of a pharmaceutical composition comprising, for example, a vector encoding a base editor and a gRNA that targets the G6PC gene of a subject (e.g., a human patient) in need thereof. Such treatment will be suitably administered to a subject, particularly a human subject, suffering from, having, susceptible to, or at risk for GSD1a. The compositions herein may be also used in the treatment of any other disorders in which GSD1a may be implicated.

[0890] In one embodiment, a method of monitoring treatment progress is provided. The method includes the step of determining a level of diagnostic marker (Marker) (e.g., SNP associated with GSD1a) or diagnostic measurement (e.g., screen, assay) in a subject suffering from or susceptible to a disorder or symptoms thereof associated with GSD1a in which the subject has been administered a therapeutic amount of a composition herein sufficient to treat the disease or symptoms thereof. The level of Marker determined in the method can be compared to known levels of Marker in either healthy normal controls or in other afflicted patients to establish the subject's disease status. In preferred embodiments, a second level of Marker in the subject is determined at a time point later than the determination of the first level, and the two levels are compared to monitor the course of disease or the efficacy of the therapy. In certain preferred embodiments, a pre-treatment level of Marker in the subject is determined prior to beginning treatment or therapy as described herein; this pre-treatment level of Marker can then be compared to the level of Marker in the subject after the treatment or therapy commences, to determine the efficacy of the treatment or therapy.

[0891] In some embodiments, cells are obtained from the subject and contacted with a pharmaceutical composition as provided herein. In some embodiments, cells removed from a subject and contacted ex vivo with a pharmaceutical composition are re-introduced into the subject, optionally after the desired genomic modification has been affected or detected in the cells.

[0892] Methods of delivering pharmaceutical compositions comprising nucleases are described, for example, in U.S. Pat. Nos. 6,453,242; 6,503,717; 6,534,261; 6,599,692; 6,607,882; 6,689,558; 6,824,978; 6,933,113; 6,979,539; 7,013,219; and 7,163,824, the disclosures of all of which are incorporated by reference herein in their entireties. Although the descriptions of pharmaceutical compositions provided herein are principally directed to pharmaceutical compositions which are suitable for administration to humans, it will be understood by the skilled artisan that such compositions are generally suitable for administration to animals or organisms of all sorts, for example, for veterinary use.

### Kits

[0893] Various aspects of this disclosure provide kits comprising a base editor system. In one embodiment, the kit comprises a nucleic acid construct comprising a nucleotide sequence encoding a nucleobase editor fusion protein. The fusion protein comprises a deaminase (e.g., adenine deaminase) and a nucleic acid programmable DNA binding protein (napDNAbp). In some embodiments, the kit comprises at least one guide RNA capable of targeting a nucleic acid molecule of interest, e.g., G6PC GSD1a associated mutations. In some embodiments, the kit comprises a nucleic acid construct comprising a nucleotide sequence encoding at least one guide RNA.

[0894] The kit provides, in some embodiments, instructions for using the kit to edit one or more G6PC GSD1a associated mutations. The instructions will generally include information about the use of the kit for editing nucleic acid molecules. In other embodiments, the instructions include at least one of the following: precautions; warnings; clinical studies; and/or references. The instructions may be printed directly on the container (when present), or as a label applied to the container, or as a separate sheet, pamphlet, card, or folder supplied in or with the container. In a further embodiment, a kit can comprise instructions in the form of a label or separate insert (package insert) for suitable operational parameters. In yet another embodiment, the kit can comprise one or more containers with appropriate positive and negative controls or control samples, to be used as standard(s) for detection, calibration, or normalization. The kit can further comprise a second container comprising a pharmaceutically-acceptable buffer, such as (sterile) phosphate-buffered saline, Ringer's solution, or dextrose solution. It can further include other materials desirable from a commercial and user standpoint, including other buffers, diluents, filters, needles, syringes, and package inserts with instructions for use. In certain embodiments, the kit is useful for the treatment of a subject having Glycogen Storage Disease Type 1a (GSD1a).

[0895] The practice of the embodiments described and provided herein employs, unless otherwise indicated, conventional techniques of molecular biology (including recombinant techniques), microbiology, cell biology, biochemistry and immunology, which are well within the purview of the skilled artisan. Such techniques are explained fully in the literature, such as, “Molecular Cloning: A Laboratory Manual”, second edition (Sambrook, 1989); “Oligonucleotide Synthesis” (Gait, 1984); “Animal Cell Culture” (Freshney, 1987); “Methods in Enzymology” “Handbook of Experimental Immunology” (Weir, 1996); “Gene Transfer Vectors for Mammalian Cells” (Miller and Calos, 1987); “Current Protocols in Molecular Biology” (Ausubel, 1987); “PCR: The Polymerase Chain Reaction”, (Mullis, 1994); “Current Protocols in Immunology” (Coligan, 1991). These techniques are applicable to the production of the polynucleotides and polypeptides described and provided herein, and, as such, may be considered in making and practicing the disclosed and described embodiments. Particularly useful techniques for particular embodiments will be discussed in the sections that follow.

[0896] The following examples are put forth so as to provide those of ordinary skill in the art with a complete disclosure and description of how to make and use the assay, screening, and therapeutic methods described herein, and are not intended to limit the scope of any of the embodiments and/or the disclosure described herein.

### EXAMPLES

### Example 1: Precise Correction In Vivo in Heterozygous Transgenic Glycogen Storage Disease Type 1a (GSD1a) R83C Mice

[0897] Glycogen storage disease type 1a (GSD1a) is caused by a mutation in the glucose-6-phosphatase (G6PC) gene, which affects about 80% of patients with GSD1a. The R83C mutation affects about 900 US patients annually diagnosed with Glycogen storage disease type 1a (GSD1a). This mutation is a single base substitution that introduces a cysteine at position 83 (R83C) of the G6PC protein. A precise correction of R83C will likely restore expression of G6PC and normalize glucose metabolism. A representative G6PC nucleotide target sequence (ATTCTCTTTGGACAGTGTCCATACTGGTGG (SEQ ID NO 399) having complementary sequence TAAGAGAAACCTGTCACAGGTATGACCACC (SEQ ID NO: 400): and corresponding amino acid sequence (ILFGQCPYWW (SEQ ID NO: 401)) indicating on target and bystander site “a” nucleobases for correction of the R83C mutation are shown in FIG. 1. A precise correction at this site would yield the following conversion: TGT>CGT or TGT>CGC (Cysteine>Arginine).

[0898] The G6PC gRNA sequence hybridizes to the complement of the G6PC target sequence shown below:

(SEQ ID NO: 395)
CAGTATGGACACTGTCCAAAGAGAAT

The NNGRRT PAM sequence (i.e., Staphylococcus aureus Cas9 (saCas9)) is underlined above.

[0899] The gRNA sequence is as follows: CAGUAUGGACACUGUCCAAA (SEQ ID NO: 370).

[0900] The base-editing efficiency of adenosine deaminase base editors (ABE) using TadA variants MSP605, MSP824, MSP825, MSP680, MSP828, and MSP829 (see Table 18) and saCas9n was evaluated in vivo using a transgenic mouse model heterozygous for huG6PC, harboring the R83C mutation for Glycogen storage disease type 1a (GSD1a) (FIGS. 2B and 3). The use of saCas9 for efficient in vivo genome editing and exemplification of an saCas9 sgRNA scaffold are described in A. Ran et al. (2015, Nature, Vol. 520, pages 186-191). The engineering of Cas9 variants, e.g., SaCas9, with relaxed PAM recognition specificities is described by B. P. Kleinstiver et al., 2014, Nature Biotechnol., 33(12):1293-1299.

TABLE 18
Adenosine Deaminase Base Editor Variants

| TadA | |
|---|---|
| Variant | mRNA base-editor variant |
| MSP605 | dimeric TadA-ABE7.10 (Y147T + Q154S + V82G)-saCas9n |
| MSP824 | dimeric TadA-ABE7.10 (Y147D + Q154S + V82G + F149Y + |
| | D167N)-saCas9n |
| MSP825 | dimeric TadA-ABE7.10 (Y147D + Q154S + V82G + L36H + |
| | N157K + F149Y + D167N)-saCas9n |
| MSP680 | monomeric TadA-ABE7.10 (Y147T + Q154S + V82G + |
| | I76Y)-saCas9n |
| MSP828 | monomeric TadA-ABE7.10 (Y147D + Q154S + V82G + |
| | I76Y + F149Y + D167N)-saCas9n |
| MSP829 | monomeric TadA-ABE7.10 (Y147D + Q154S + V82G + |
| | I76Y + L36H + N157K + F149Y + D167N)-saCas9n |

[0901] FIG. 2A depicts the in vivo workflow used to introduce the base editors into the transgenic mice. Lipid nanoparticles (LNP) carrying base editor mRNA and gRNA were dosed via intravenous (IV) injection into the transgenic mice at a dose of 1 mg/kg. Next-generation sequencing data from whole-liver extracts revealed significant correction for R83C (FIGS. 2B and 3). TadA variant MSP828 demonstrated about 40% precise correction of the R83C mutation, with low bystander editing. This level of mutation correction is expected to restore glucose homeostasis.

[0902] The level of in vivo correction for Glycogen storage disease type 1a (GSD1a) by base-editing was greater than that achieved by HDR-base (homology directed repair) methodologies and was achieved without insertion or double-stranded breaks. These results demonstrate base-editing technology as an effective approach for mutation correction for Glycogen storage disease type 1a (GSD1a) and its therapeutic potential.

### Example 2: In Vivo Base Editing Correction of Metabolic Defects in GSD1a R83C Mice GSD1a Overview

[0903] As depicted schematically in FIG. 4, (GSD1a) is an autosomal recessive disorder caused by mutations in the G6PC gene. The most prevalent pathogenic mutation identified in Caucasian GSD1a patients is R83C, located in the active site of the enzyme and associated with inactivation of G6Pase. A loss of G6Pase function can result in life-threatening hypoglycemia, seizures and even death. To mitigate hypoglycemia, patients must maintain strict and frequent adherence to glucose supplementation through day and night, by way of a slow glucose release formula. One missed or delayed dose can result in emergency hypoglycemia. Among many complications, enlarged liver, accumulation of uric acid, lactate, and lipids are common in GSD1a patients.

### Utility of the Described Base Editors for Generating Permanent and Predictable Single

### Nucleotide Substitutions

[0904] The R83C mutation introduces a single G>A conversion in the g6pc gene. Adenine base editors (ABEs) as described herein effect the programmable conversion of A to G in genomic DNA, thus supporting their utility to correct this mutation. As shown schematically in FIG. 5, the adenine base editor is a fusion protein containing an evolved TadA deaminase connected to CRISPR-Cas enzyme. The base editor binds to target DNA that is complementary to the guide-RNA (superimposed on the CRISPR-Cas9 enzyme) and exposes a stretch of single-stranded DNA. The deaminase converts the target adenine into inosine, and the Cas enzyme nicks the opposite strand, which is then repaired, completing the base pair conversion. Thus, the direct repair of a point mutation has the potential for restoration of gene function.

[0905] In this Example, base-editors for A>G conversion in the g6pc gene were optimized for correction of R83C. Shown in FIG. 6A is the target DNA sequence (CCACCAGTATGGACACTGTCCAAAGAGAAT (SEQ ID NO: 402)) and underlying amino acid translation for the GSD1a R83C mutation (WWYPCQGFLI; SEQ ID NO: 403). The target nucleobase to be edited is represented by double underlining, at position 12. The editing window also includes a possible bystander, shown represented by single underlining at position 6. An edit that may result in a synonymous conversion is shown at position 10.

[0906] For screening, a HEK293 cell line that expressed the G6PC transgene harboring the R83C mutation was generated and was transfected with base-editor mRNA and gRNA. Allele frequencies were assessed by high-throughput targeted amplicon Next-Generation Sequencing. Variants 1-5 represent a combination of gRNA and base-editor RNA, engineered for optimized target correction. Variant 5 yielded approximately 60% targeted base-editing efficiency for R83C correction and limited bystander editing (FIG. 6B).

### Mouse In Vivo Disease Model and Demonstration of In Vivo Correction of the R83C Single Nucleotide Mutation

### In Vivo Correction of R83C Base Editing

[0907] To validate base-editing efficiency for R83C correction in vivo, a novel GSD1a mouse that expresses the human G6PC-R83C transgene in place of mouse G6pc was generated. It was confirmed that mice homozygous for huR83C exhibited postnatal lethality and rarely survived to weaning (21 days). On glucose supplementation therapy, the animals survived to at least 3 weeks of age and revealed characteristic pathological signatures of GSD1a, such as reduced body weight, enlarged livers, significant G6Pase inhibition, and abnormal serum metabolites compared to littermate controls (FIG. 7). This phenotype is consistent with published and clinical reports in humans.

[0908] For the in vivo experiments, LNP-mediated delivery was tested in transgenic mice that were heterozygous for huR83C due to neonatal lethality of homozygous mice. The schematic in FIG. 2A depicts in vivo workflow, with lipid nanoparticle, or LNP, co-formulations of base-editor mRNA and gRNA dosed via IV injection. Given neonatal lethality of the homozygous mice, LNP-dosing was administered via the temporal vein shortly post birth, and activity was compared with that in adult mice. Next Generation Sequencing (NGS) analysis of whole liver extracts revealed approximately 40% base-editing efficiency in adults and up to ˜60% efficiency in newborns, with a broader range in efficiencies (FIG. 8A). Bystander editing remained low in adults and newborns. (FIG. 8A).

[0909] Newborn mice homozygous for huR83C were treated with lipid nanoparticles (LNP) containing guide RNA and mRNA encoding ABE. It was found that the treated mice survived and grew normally to 3 weeks of age, without hypoglycemia-induced seizures, in the absence of glucose therapy. The treated homozygous huR83C mice displayed editing efficiencies up to ˜60% in total liver extracts, consistent with littermate controls that were heterozygous for huR83C (FIG. 8B). It was thus demonstrated that LNP-mediated R83C correction was associated with the survival of the homozygous huR83C mice.

### Reversal of GSD-1a Pathology Via Base-Editing for Correction of R83C In Vivo

[0910] At 3 weeks, it was validated and confirmed that the treated homozygous huR83C mice displayed proper metabolic function, with restoration of near-normal serum metabolites, including glucose, triglycerides, cholesterol, lactate, and uric acid, as demonstrated by the darker-color bars in FIG. 9A, compared to controls. Moreover, the results of biochemical assays of G6PC activity (as assessed biochemically and via lead-phosphate staining) in LNP-treated homozygous huR83C mice were consistent with those of litter-mate controls. (FIG. 9A).

[0911] Hepatomegaly is another clinical presentation of GSD1a and is primarily caused by excess glycogen and lipid deposition in the liver. To evaluate the extent of hepatomegaly in homozygous huG6PC-R83C mice post base-editing, liver sections were collected from 3 wk old newborn mice and immune-histochemical analysis were conducted via hematoxylin and eosin (H&E) and Oil red O staining (FIG. 9B). Significant lipid deposition (heavy H&E staining) and enlarged hepatocytes was visualized in liver sections from homozygous mice exhibiting negligible G6Pase activity (FIG. 9B, center panels, H&E), consistent with GSD-1a. In the case of base-edited homozygous huG6PC-R83C mice showing restored G6PC activity (“HOM huR83C”, right panels, FIG. 9B), lipid deposition was significantly reduced and consistent with controls (left panel), (FIG. 9B, Lipid), and restoration of hepatocyte size was apparent. Accordingly, the immuno-histochemical analyses revealed normal hepatocyte size and lipid deposition in LNP-treated mice. (FIG. 9B). Taken together, the data demonstrate the ability of base-editing to correct the R83C mutation and to reverse the metabolic defects and pathology associated with GSD1a. In addition, these data lend further support of the functional restoration and positive clinical outcomes via base-editing for GsD-1a.

[0912] As described in this Example, novel adenine base editors and guide RNA that achieved precise correction of R83C in vitro and in vivo were generated and validated. LNP-mediated delivery of ABE and gRNA yielded significant base-editing efficiency, namely, up to ˜60% base editing efficiency, with restoration of hepatic G6Pase activity and metabolic function consistent with controls.

### Single LNP Dose Administration Maintains Euglycemia During a 24 Hour Fasting Challenge Via Base Editing

[0913] A hallmark symptom of GSD-1a pathology is fasting hypoglycemia, with a precipitous decline in blood glucose levels within minutes. A full proof-of-concept study was conducted in GSD-1a transgenic mice, homozygous for huG6PC-R83C, to test whether the animals could sustain a 24 hour (hr) fast after base-editing treatment as described herein. In this study, 100% animal survival was achieved post-24 hr fasting period in LNP-treated (1.5 mpk) GSD-1a animals and in healthy controls. In addition, normal fasting glucose levels were measured in control mice and in treated mice pre- and post-24 hr fasting, which maintained levels above hypoglycemic therapeutic threshold (>60 mg/dL), (FIG. 10).

Kaplan-Meier Survival Estimates for Homozygous huG6PC-R83C Mice

[0914] Kaplan-Meier survival curves were generated to estimate the survival of newborn transgenic mice homozygous for huG6PC-R83C, either post base-editing via ABE mRNA (ABE-treated) or untreated (Untreated), (FIG. 12) Newborn mice were genotyped via PCR analysis of genomic tail DNA using the following primers, a universal forward primer (5′-ACCTACTGATGATGCACCTTTGATCAATAGAT-3′), (SEQ ID NO: 424), a mouse specific reverse primer (5′-CATCACCCCTCGGGATGGTTCTT-3′), (SEQ ID NO: 425), a human specific reverse primer 1 (5′-CAGCCCAGAATCCCAACCACAAAAT-3′), (SEQ ID NO: 426), and a human specific reverse primer 2 (5′-AGACCAGCTCGACTTGGGATGG-3′), (SEQ ID NO: 427). Survival was noted for transgenic mice homozygous for huG6PC-R83C. Untreated mice were either still-born (n=6) or died at 8 hours (n=6) and 24 hours (n=1). Administration of 15% glucose injections extended survival of the animals to 32 hours (n=5), 48 hours (n=2), and 56 hours (n=2). All ABE-treated mice homozygous for huG6PC-R83C survived to the termination of study at 3 weeks.

G6PC Target Sequences for Use with Base Editors to Correct the R83C Mutation

[0915] In addition to the G6PC target sequence and guide RNA described in Example 1, alternative G6PC target sequences that can be used in conjunction with the base editors to effect base editing to correct the R83C mutation as described herein include those shown in Table 19. As shown, the target sequences include the types of PAMs and base editors, such as IBEs as described herein, suitable for use. In the protospacer sequences in Table 19, the position of the targeted “A” nucleotide (i.e., A8-A15) is shown in bold/underline. G6PC gRNA sequences hybridize to the complement of the G6PC target sequence shown in Table 19. The PAM sequences (e.g., SpCas9) are underlined in Table 19.

[0916] Inlaid base editors (IBEs) noted in Table 19 refer to structures of Cas9 and TadA having an architecture in which the deaminase domains are internal to (embedded inside) a CRISPR-Cas protein, e.g., Cas9. The IBE architecture allows for a greater breadth of potential base editing targets compared with other base editors and is not limited by the requirement of a suitably positioned Cas9 protospacer adjacent motif sequence. Such IBEs exhibited shifted editing windows and exhibited greater editing efficiency, thus allowing for the editing of targets outside the canonical editing window with reduced DNA and RNA off-target editing frequency. Accordingly, IBEs expand the breadth of potential base editing targets by extending the range of editing windows that can be created for any given CRISPR-Cas protein used to target the DNA. Through the insertion of the deaminase into a CRISPR protein at different strategic positions, the active site of the deaminase can be repositioned, making IBEs capable of editing outside the traditional editing window. IBE architectures are described hereinabove and in S. Haihua Chu et al., The CRISPR Journal, Vol. 4, No. 2; published online 20 Apr. 2021 (DOI: 10.1089/crispr.2020.0144).

TABLE 19
Protospacer + PAM sequences (5′ to 3′) for
correcting the R83C mutation, where the PAM
sequence is underlined

CCACCAGTATGGACACTGTC CAAA (SEQ ID NO: 416) with
spCas9-NRRH A15 can use IBE architecture
CACCAGTATGGACACTGTCC AAAG (SEQ ID NO: 417) with
spCas9-NRRH A14 can use IBE architecture
ACCAGTATGGACACTGTCCA AAGA (SEQ ID NO: 418) with
spCas9-NRRH A13 can use IBE architecture
CCAGTATGGACACTGTCCAA AGAG (SEQ ID NO: 419) with
spCas9-NRRH A12 can use IBE architecture
CAGTATGGACACTGTCCAAA GAGA (SEQ ID NO: 420) with
spCas9-NRRH A11 can use IBE architecture
AGTATGGACACTGTCCAAAG AGA (SEQ ID NO: 421) with
spCas9-NGA A10 can use IBE architecture
GTATGGACACTGTCCAAAGA GAAT (SEQ ID NO: 422) with
spCas9-NRRH A9 can use IBE architecture
TATGGACACTGTCCAAAGAG AATC (SEQ ID NO: 423) with
spCas9-NRTH A8 can use IBE architecture

[0917] The gRNA sequences which hybridize to the complement of the G6PC target sequence in Table 19 are as follows (5′ to 3′): CCACCAGUAUGGACACUGUC (SEQ ID NO: 371); CACCAGUAUGGACACUGUCC (SEQ ID NO: 372); ACCAGUAUGGACACUGUCCA (SEQ ID NO: 373); CCAGUAUGGACACUGUCCAA (SEQ ID NO: 374); CAGUAUGGACACUGUCCAAA (SEQ ID NO: 370); AGUAUGGACACUGUCCAAAG (SEQ ID NO: 375); GUAUGGACACUGUCCAAAGA (SEQ ID NO: 376); and UAUGGACACUGUCCAAAGAG (SEQ ID NO: 377).

[0918] A protospacer and PAM sequence for use in the products, compositions and methods described herein is, (5′ to 3′), CAGTATGGACACTGTCCAAAGAGAAT (SEQ ID NO: 395), in which the PAM sequence, GAGAAT, is underlined. The gRNA sequence, as presented supra, which hybridizes to the complement of the target sequence is CAGUAUGGACACUGUCCAAA (3′ PAM sequence GAGAAT as shown in the sequence above) (SEQ ID NO: 370).

[0919] The gRNA sequence used in the methods described herein comprises or consists of:

(SEQ ID NO: 409)
CACCAGUAUGGACACUGUCCAAAGUUUUAGUACUCUGUAAUGAAAAUUAC
AGAAUCUACUAAAACAAGGCAAAAUGCCGUGUUUAUCUCGUCAACUUGUU
GGCGAGAUUUU
or
(SEQ ID NO: 410)
CCACCAGUAUGGACACUGUCCAAAGUUUUAGUACUCUGUAAUGAAAAUUA
CAGAAUCUACUAAAACAAGGCAAAAUGCCGUGUUUAUCUCGUCAACUUGU
UGGCGAGAUUUU.

[0920] In some embodiments, the gRNA sequence used in the methods described herein comprises one or more modified nucleosides. Two exemplary sequences are provided below:

sgRNA_096: 23 nt protospacer
(SEQ ID NO: 409)
mCsmAsmCsCAGUAUGGACACUGUCCAAAGUUUUAGUACUCUGUAAUGAA
AAUUACAGAAUCUACUAAAACAAGGCAAAAUGCCGUGUUUAUCUCGUCAA
CUUGUUGGCGAGAmUsmUsmUsU
sgRNA_097: 34 nt protospacer
(SEQ ID NO: 410)
mCsmCsmAsCCAGUAUGGACACUGUCCAAAGUUUUAGUACUCUGUAAUGA
AAAUUACAGAAUCUACUAAAACAAGGCAAAAUGCCGUGUUUAUCUCGUCA
ACUUGUUGGCGAGAmUsmUsmUsU.

### Example 3: Optimization Via New ABE Variants for R83C Correction

[0921] To diversify and expand a selection of saABE variants for R83C correction, the adenosine deaminase domain (referred to as a TadA domain) was engineered via directed evolution to include a combination of mutations. Such mutations were based, at least in part, on novel molecular engineering efforts. Table 20 provides a list of novel SaABE variants, 823-829, and shows mutations present in the TadA domain that were tested alongside two other TadA variants, MSP605 and MSP680, both in vitro and in vivo. Combinations of mutations, including Y147D, F149Y, and D167N, in the TadA deaminase yielded an increase in on-target editing and reduction in bystander editing (FIG. 3). By way of further example, other engineered saABE variants that demonstrated effective on-target editing and reduced bystanding editing include at least one or more of the following mutations: L36H; I76Y; V82G; Q154S; and N157K, e.g., an saABE variant containing at least a combination of I76Y; V82G; Q154S.

TABLE 20
Novel saABE variants for use in correcting a GSD-Ia-R83C mutation

| | | TadA Amino Acid Number | | | | | | | |
|---|---|---|---|---|---|---|---|---|---|
| Variant | | 36 | 76 | 82 | 147 | 149 | 154 | 157 | 167 |
| TadA-7.10 | | L | I | V | Y | F | Q | N | D |
| 605 | dimer | | | G | T | | S | | |
| 680 | mono | | Y | G | T | | S | | |
| 823 | dimer | H | | G | T | | S | K | |
| 824 | dimer | | | G | D | Y | S | | N |
| 825 | dimer | H | | G | D | Y | S | K | N |
| 827 | mono | H | Y | G | T | | S | K | |
| 828 | mono | | Y | G | D | Y | S | | N |
| 829 | mono | H | Y | G | D | Y | S | K | N |

### Example 4: Base Editor Sequences

[0922] Polynucleotide (mRNA, DNA) sequences and corresponding amino acid sequence of a representative base editor as described herein are presented below.

MSP828 Base Editor mRNA Sequence

[0923] The MSP828 base-editor mRNA open reading frame (ORF) is shown by underlining in the below mRNA sequence.

(SEQ ID NO: 396)
AGGAAAUAAGAGAGAAAAGAAGAGUAAGAAGAAAUAUAAGAGCCACCAUGAGCGAGGUCGAG
UUCUCUCACGAAUAUUGGAUGAGACACGCUCUCACCCUGGCUAAGAGAGCCAGGGACGAAAG
AGAGGUGCCAGUUGGCGCUGUCCUGGUGUUGAACAAUCGCGUCAUCGGAGAAGGAUGGAAUC
GCGCCAUUGGCCUGCACGAUCCAACCGCACAUGCCGAAAUUAUGGCUCUGCGGCAAGGCGGC
CUCGUGAUGCAAAAUUACAGACUGUACGAUGCUACCCUCUACGGCACCUUCGAGCCCUGUGU
CAUGUGUGCUGGGGCAAUGAUUCACUCCCGGAUUGGCCGCGUGGUGUUUGGAGUGCGGAAUG
CCAAGACUGGCGCCGCUGGAUCUCUGAUGGACGUCCUGCACUAUCCUGGGAUGAACCACCGG
GUCGAGAUCACAGAGGGAAUUCUGGCUGACGAGUGCGCAGCCCUGCUGUGCGACUUCUAUAG
AAUGCCCAGAUCGGUGUUCAACGCCCAGAAAAAAGCUCAGAGCAGUACCAAUUCCGGCGGAA
GCAGCGGAGGAUCUUCUGGAAGCGAAACCCCAGGCACCAGCGAGUCUGCCACACCAGAAUCA
UCUGGCGGUAGCUCCGGCGGCUCCAAGAGAAAUUACAUCCUGGGCCUCGCCAUCGGCAUCAC
CUCUGUCGGCUACGGCAUCAUCGACUACGAGACACGGGAUGUGAUUGAUGCCGGCGUGCGGC
UGUUCAAAGAGGCCAACGUCGAGAACAACGAGGGCCGCAGAUCUAAGAGGGGAGCCAGACGG
CUGAAGAGAAGGCGGAGACACAGAAUCCAGAGAGUGAAGAAGCUGCUGUUCGACUACAACCU
GCUGACCGACCACAGCGAGCUGAGCGGCAUCAACCCUUAUGAGGCCAGAGUGAAGGGCCUGA
GCCAGAAGCUGAGCGAGGAAGAGUUUAGCGCCGCACUGCUGCACCUGGCCAAGAGAAGAGGC
GUGCACAACGUGAACGAAGUGGAAGAGGACACCGGCAACGAGCUGUCCACCAAAGAGCAGAU
CAGCAGAAACAGCAAGGCCCUGGAAGAGAAAUACGUGGCCGAACUGCAGCUGGAACGGCUGA
AAAAGGAUGGCGAAGUGCGGGGCAGCAUCAACCGGUUCAAGACCAGCGACUACGUGAAAGAA
GCCAAACAGCUGCUGAAGGUGCAGAAGGCCUACCACCAGCUGGACCAGAGCUUCAUCGACAC
CUACAUCGACCUGCUGGAAACCCGGCGGACCUACUAUGAAGGACCUGGCGAGGGAAGCCCCU
UCGGCUGGAAGGACAUCAAAGAAUGGUACGAGAUGCUGAUGGGCCACUGCACCUACUUUCCC
GAGGAACUGCGGAGCGUGAAGUACGCCUACAACGCCGACCUGUACAACGCCCUGAACGACCU
GAACAACCUCGUGAUCACCCGGGACGAGAACGAGAAGCUGGAAUAUUACGAGAAGUUCCAGA
UCAUCGAGAACGUGUUCAAGCAGAAGAAGAAGCCCACACUGAAGCAGAUCGCCAAAGAGAUC
CUGGUCAACGAGGAAGAUAUCAAGGGCUACAGAGUGACCAGCACCGGCAAGCCCGAGUUCAC
CAACCUGAAGGUGUACCACGACAUCAAGGAUAUCACAGCCCGGAAAGAGAUUAUUGAGAACG
CCGAGCUGCUGGACCAAAUCGCCAAGAUCCUGACCAUCUACCAGUCCUCCGAGGACAUCCAA
GAGGAACUGACCAAUCUGAACUCCGAGCUGACCCAAGAAGAGAUCGAGCAGAUCUCUAAUCU
GAAGGGGUACACAGGCACCCACAACCUGAGCCUGAAGGCCAUCAACCUGAUCCUGGACGAGC
UGUGGCACACCAACGACAACCAGAUUGCCAUCUUCAACCGGCUGAAGCUGGUGCCCAAGAAG
GUGGACCUCAGCCAGCAGAAAGAAAUCCCCACCACACUGGUGGACGACUUCAUUCUGAGCCC
CGUGGUCAAGAGAAGCUUCAUCCAGAGCAUCAAAGUGAUCAACGCCAUCAUCAAGAAGUACG
GGCUGCCCAACGAUAUCAUCAUCGAGCUGGCCCGCGAGAAGAACUCCAAGGACGCUCAGAAA
AUGAUCAACGAGAUGCAGAAGCGGAACCGGCAGACCAACGAGCGGAUCGAGGAAAUCAUCCG
GACCACCGGCAAAGAGAACGCCAAGUACCUGAUCGAGAAGAUCAAGCUGCACGACAUGCAAG
AGGGCAAGUGUCUGUACAGCCUGGAAGCCAUUCCUCUGGAAGAUCUGCUGAACAAUCCCUUC
AACUACGAGGUGGACCACAUCAUCCCCAGAAGCGUGUCCUUCGACAACAGCUUCAACAACAA
GGUGCUCGUGAAGCAAGAGGAAAACUCCAAGAAGGGCAACAGAACCCCAUUCCAGUACCUGA
GCAGCUCCGACAGCAAGAUCAGCUACGAAACCUUCAAGAAGCACAUCCUGAAUCUGGCCAAA
GGCAAGGGCCGCAUCAGCAAGACCAAGAAAGAAUACCUGCUCGAGGAACGGGACAUCAACAG
AUUCAGCGUGCAGAAAGACUUCAUCAAUCGGAACCUGGUGGACACCAGAUACGCCACCAGAG
GCCUGAUGAAUCUGCUGAGAAGCUACUUCCGCGUGAACAAUCUGGACGUGAAAGUCAAGUCC
AUCAACGGCGGCUUCACCAGCUUUCUGCGGAGAAAGUGGAAGUUCAAGAAAGAGCGGAACAA
GGGCUAUAAGCACCACGCCGAGGACGCCCUGAUCAUUGCCAACGCCGAUUUCAUCUUCAAAG
AGUGGAAGAAACUGGACAAGGCCAAAAAAGUGAUGGAAAACCAGAUGUUCGAGGAAAAGCAG
GCCGAGAGCAUGCCCGAGAUCGAAACCGAGCAAGAGUACAAAGAGAUUUUCAUCACGCCCCA
CCAGAUCAAGCACAUUAAGGACUUCAAGGACUACAAGUACAGCCACCGCGUGGACAAGAAGC
CUAAUAGAGAGCUGAUUAACGACACCCUGUACAGCACCCGGAAGGACGACAAGGGCAAUACC
CUGAUCGUCAACAACCUGAACGGCCUGUACGACAAGGACAACGACAAGCUCAAGAAGCUGAU
CAACAAGAGCCCCGAGAAACUGCUGAUGUACCACCACGAUCCUCAGACCUACCAGAAACUGA
AGCUCAUCAUGGAACAGUACGGCGACGAGAAGAAUCCCCUGUACAAGUACUACGAGGAAACC
GGGAACUACCUGACCAAGUACUCCAAAAAGGACAAUGGGCCCGUGAUCAAGAAGAUUAAGUA
UUACGGCAACAAGCUGAAUGCCCACCUGGACAUCACCGACGACUACCCCAACUCCAGAAACA
AGGUGGUCAAGCUGUCCCUGAAGCCUUACAGAUUCGACGUGUACCUGGACAACGGCGUGUAC
AAGUUCGUGACCGUGAAGAACCUGGAUGUGAUCAAAAAAGAAAACUACUACGAAGUGAACAG
CAAGUGCUAUGAGGAAGCCAAGAAACUCAAGAAAAUCAGCAACCAGGCCGAGUUUAUCGCCU
CCUUCUACAACAACGAUCUGAUCAAGAUCAACGGGGAGCUGUAUAGAGUGAUUGGGGUCAAC
AAUGACCUGCUGAACCGGAUCGAAGUCAACAUGAUCGACAUCACCUACCGCGAGUACCUCGA
GAACAUGAACGACAAGAGGCCUCCACGGAUCAUUAAGACAAUCGCCAGCAAGACGCAGAGCA
UUAAGAAGUACAGCACUGACAUUCUGGGCAACCUGUACGAAGUCAAGAGCAAAAAGCACCCG
CAGAUUAUCAAGAAAGGCGAGGGCGCCGACAAGAGAACAGCCGAUGGUUCCGAGUUCGAAAG
CCCCAAGAAGAAGAGGAAAGUCUAGUUAAUUAAGCUGCCUUCUGCGGGGCUUGCCUUCUGGC
CAUGCCCUUCUUCUCUCCCUUGCACCUGUACCUCUUGGUCUUUGAAUAAAGCCUGAGUAGGA
AGAAAAAAAAAAAAAAAAAAAAAAAAAAAAAAAAAAAAAAAAAAAAAAAAAAAAAAAAAAAA
AAAAAAAAAAAAAAAAAAAAAAAAAAAAAAAAAAAAAAAAAAAAAAAAAAAAAAAAAAAA
MSP828 base editor DNA sequence
(SEQ ID NO: 397)
ATGAGCGAGGTCGAGTTCTCTCACGAATATTGGATGAGACACGCTCTCACCCTGGCTAAGAG
AGCCAGGGACGAAAGAGAGGTGCCAGTTGGCGCTGTCCTGGTGTTGAACAATCGCGTCATCG
GAGAAGGATGGAATCGCGCCATTGGCCTGCACGATCCAACCGCACATGCCGAAATTATGGCT
CTGCGGCAAGGCGGCCTCGTGATGCAAAATTACAGACTGTACGATGCTACCCTCTACGGCAC
CTTCGAGCCCTGTGTCATGTGTGCTGGGGCAATGATTCACTCCCGGATTGGCCGCGTGGTGT
TTGGAGTGCGGAATGCCAAGACTGGCGCCGCTGGATCTCTGATGGACGTCCTGCACTATCCT
GGGATGAACCACCGGGTCGAGATCACAGAGGGAATTCTGGCTGACGAGTGCGCaGCCCTGCT
GTGCgacTTCTaTAGAATGCCCAGAtcGGTGTTCAACGCCCAGAAAAAAGCTCAGAGCAGtA
CCaATTCCGGCGGAAGCAGCGGAGGATCTTCTGGAAGCGAAACCCCAGGCACCAGCGAGTCT
GCCACACCAGAATCATCTGGCGGTAGCTCCGGCGGCTCCAAGAGAAATTACATCCTGGGCCT
CGCCATCGGCATCACCTCTGTCGGCTACGGCATCATCGACTACGAGACACGGGATGTGATTG
ATGCCGGCGTGCGGCTGTTCAAAGAGGCCAACGTCGAGAACAACGAGGGCCGCAGATCTAAG
AGGGGAGCCAGACGGCTGAAGAGAAGGCGGAGACACAGAATCCAGAGAGTGAAGAAGCTGCT
GTTCGACTACAACCTGCTGACCGACCACAGCGAGCTGAGCGGCATCAACCCTTATGAGGCCA
GAGTGAAGGGCCTGAGCCAGAAGCTGAGCGAGGAAGAGTTTAGCGCCGCACTGCTGCACCTG
GCCAAGAGAAGAGGCGTGCACAACGTGAACGAAGTGGAAGAGGACACCGGCAACGAGCTGTC
CACCAAAGAGCAGATCAGCAGAAACAGCAAGGCCCTGGAAGAGAAATACGTGGCCGAACTGC
AGCTGGAACGGCTGAAAAAGGATGGCGAAGTGCGGGGCAGCATCAACCGGTTCAAGACCAGC
GACTACGTGAAAGAAGCCAAACAGCTGCTGAAGGTGCAGAAGGCCTACCACCAGCTGGACCA
GAGCTTCATCGACACCTACATCGACCTGCTGGAAACCCGGCGGACCTACTATGAAGGACCTG
GCGAGGGAAGCCCCTTCGGCTGGAAGGACATCAAAGAATGGTACGAGATGCTGATGGGCCAC
TGCACCTACTTTCCCGAGGAACTGCGGAGCGTGAAGTACGCCTACAACGCCGACCTGTACAA
CGCCCTGAACGACCTGAACAACCTCGTGATCACCCGGGACGAGAACGAGAAGCTGGAATATT
ACGAGAAGTTCCAGATCATCGAGAACGTGTTCAAGCAGAAGAAGAAGCCCACACTGAAGCAG
ATCGCCAAAGAGATCCTGGTCAACGAGGAAGATATCAAGGGCTACAGAGTGACCAGCACCGG
CAAGCCCGAGTTCACCAACCTGAAGGTGTACCACGACATCAAGGATATCACAGCCCGGAAAG
AGATTATTGAGAACGCCGAGCTGCTGGACCAAATCGCCAAGATCCTGACCATCTACCAGTCC
TCCGAGGACATCCAAGAGGAACTGACCAATCTGAACTCCGAGCTGACCCAAGAAGAGATCGA
GCAGATCTCTAATCTGAAGGGGTACACAGGCACCCACAACCTGAGCCTGAAGGCCATCAACC
TGATCCTGGACGAGCTGTGGCACACCAACGACAACCAGATTGCCATCTTCAACCGGCTGAAG
CTGGTGCCCAAGAAGGTGGACCTCAGCCAGCAGAAAGAAATCCCCACCACACTGGTGGACGA
CTTCATTCTGAGCCCCGTGGTCAAGAGAAGCTTCATCCAGAGCATCAAAGTGATCAACGCCA
TCATCAAGAAGTACGGGCTGCCCAACGATATCATCATCGAGCTGGCCCGCGAGAAGAACTCC
AAGGACGCTCAGAAAATGATCAACGAGATGCAGAAGCGGAACCGGCAGACCAACGAGCGGAT
CGAGGAAATCATCCGGACCACCGGCAAAGAGAACGCCAAGTACCTGATCGAGAAGATCAAGC
TGCACGACATGCAAGAGGGCAAGTGTCTGTACAGCCTGGAAGCCATTCCTCTGGAAGATCTG
CTGAACAATCCCTTCAACTACGAGGTGGACCACATCATCCCCAGAAGCGTGTCCTTCGACAA
CAGCTTCAACAACAAGGTGCTCGTGAAGCAAGAGGAAAACTCCAAGAAGGGCAACAGAACCC
CATTCCAGTACCTGAGCAGCTCCGACAGCAAGATCAGCTACGAAACCTTCAAGAAGCACATC
CTGAATCTGGCCAAAGGCAAGGGCCGCATCAGCAAGACCAAGAAAGAATACCTGCTCGAGGA
ACGGGACATCAACAGATTCAGCGTGCAGAAAGACTTCATCAATCGGAACCTGGTGGACACCA
GATACGCCACCAGAGGCCTGATGAATCTGCTGAGAAGCTACTTCCGCGTGAACAATCTGGAC
GTGAAAGTCAAGTCCATCAACGGCGGCTTCACCAGCTTTCTGCGGAGAAAGTGGAAGTTCAA
GAAAGAGCGGAACAAGGGCTATAAGCACCACGCCGAGGACGCCCTGATCATTGCCAACGCCG
ATTTCATCTTCAAAGAGTGGAAGAAACTGGACAAGGCCAAAAAAGTGATGGAAAACCAGATG
TTCGAGGAAAAGCAGGCCGAGAGCATGCCCGAGATCGAAACCGAGCAAGAGTACAAAGAGAT
TTTCATCACGCCCCACCAGATCAAGCACATTAAGGACTTCAAGGACTACAAGTACAGCCACC
GCGTGGACAAGAAGCCTAATAGAGAGCTGATTAACGACACCCTGTACAGCACCCGGAAGGAC
GACAAGGGCAATACCCTGATCGTCAACAACCTGAACGGCCTGTACGACAAGGACAACGACAA
GCTCAAGAAGCTGATCAACAAGAGCCCCGAGAAACTGCTGATGTACCACCACGATCCTCAGA
CCTACCAGAAACTGAAGCTCATCATGGAACAGTACGGCGACGAGAAGAATCCCCTGTACAAG
TACTACGAGGAAACCGGGAACTACCTGACCAAGTACTCCAAAAAGGACAATGGGCCCGTGAT
CAAGAAGATTAAGTATTACGGCAACAAGCTGAATGCCCACCTGGACATCACCGACGACTACC
CCAACTCCAGAAACAAGGTGGTCAAGCTGTCCCTGAAGCCTTACAGATTCGACGTGTACCTG
GACAACGGCGTGTACAAGTTCGTGACCGTGAAGAACCTGGATGTGATCAAAAAAGAAAACTA
CTACGAAGTGAACAGCAAGTGCTATGAGGAAGCCAAGAAACTCAAGAAAATCAGCAACCAGG
CCGAGTTTATCGCCTCCTTCTACAACAACGATCTGATCAAGATCAACGGGGAGCTGTATAGA
GTGATTGGGGTCAACAATGACCTGCTGAACCGGATCGAAGTCAACATGATCGACATCACCTA
CCGCGAGTACCTCGAGAACATGAACGACAAGAGGCCTCCACGGATCATTAAGACAATCGCCA
GCAAGACGCAGAGCATTAAGAAGTACAGCACTGACATTCTGGGCAACCTGTACGAAGTCAAG
AGCAAAAAGCACCCGCAGATTATCAAGAAAGGCgagGGCGCCGACAAGAGAACAgccgatgg
ttccgagttcgaaagccccaagaagaagaggaaagtctaG

[0924] Translated protein (amino acid) sequence of the MSP828 base editor

(SEQ ID NO: 398)
MSEVEFSHEYWMRHALTLAKRARDEREVPVGAVLVLNNRVIGEGWNRAIGLHDPTAHAEIMA
LRQGGLVMQNYRLYDATLYGTFEPCVMCAGAMIHSRIGRVVFGVRNAKTGAAGSLMDVLHYP
GMNHRVEITEGILADECAALLCDFYRMPRSVFNAQKKAQSSTNSGGSSGGSSGSETPGTSES
ATPESSGGSSGGSKRNYILGLAIGITSVGYGIIDYETRDVIDAGVRLFKEANVENNEGRRSK
RGARRLKRRRRHRIQRVKKLLFDYNLLTDHSELSGINPYEARVKGLSQKLSEEEFSAALLHL
AKRRGVHNVNEVEEDTGNELSTKEQISRNSKALEEKYVAELQLERLKKDGEVRGSINRFKTS
DYVKEAKQLLKVQKAYHOLDQSFIDTYIDLLETRRTYYEGPGEGSPFGWKDIKEWYEMLMGH
CTYFPEELRSVKYAYNADLYNALNDLNNLVITRDENEKLEYYEKFQIIENVFKQKKKPTLKQ
IAKEILVNEEDIKGYRVTSTGKPEFTNLKVYHDIKDITARKEIIENAELLDQIAKILTIYOS
SEDIQEELTNLNSELTQEEIEQISNLKGYTGTHNLSLKAINLILDELWHTNDNQIAIFNRLK
LVPKKVDLSQQKEIPTTLVDDFILSPVVKRSFIQSIKVINAIIKKYGLPNDIIIELAREKNS
KDAQKMINEMQKRNRQTNERIEEIIRTTGKENAKYLIEKIKLHDMQEGKCLYSLEAIPLEDL
LNNPFNYEVDHIIPRSVSFDNSFNNKVLVKQEENSKKGNRTPFQYLSSSDSKISYETFKKHI
LNLAKGKGRISKTKKEYLLEERDINRFSVOKDFINRNLVDTRYATRGLMNLLRSYFRVNNLD
VKVKSINGGFTSFLRRKWKFKKERNKGYKHHAEDALIIANADFIFKEWKKLDKAKKVMENQM
FEEKQAESMPEIETEQEYKEIFITPHQIKHIKDFKDYKYSHRVDKKPNRELINDTLYSTRKD
DKGNTLIVNNLNGLYDKDNDKLKKLINKSPEKLLMYHHDPQTYQKLKLIMEQYGDEKNPLYK
YYEETGNYLTKYSKKDNGPVIKKIKYYGNKLNAHLDITDDYPNSRNKVVKLSLKPYRFDVYL
DNGVYKFVTVKNLDVIKKENYYEVNSKCYEEAKKLKKISNQAEFIASFYNNDLIKINGELYR
VIGVNNDLLNRIEVNMIDITYREYLENMNDKRPPRIIKTIASKTQSIKKYSTDILGNLYEVK
SKKHPQ [symbol] V

[0925] In the above MSP828 protein (amino acid) sequence, the TadA 7.10 domain is indicated by underlining; the linker sequence is indicated by bold font; the SaCas9 sequence is indicated by double underlining; and the nuclear localization signal (bpNLS) is indicated by dotted line underlining.

### Example 5: Heavily Modified SaCas9 gRNA Sequences

[0926] This example provides representative saCas9 guide RNA sequences designed to include numerous sequence modifications (heavily modified SaCas9 gRNA sequences or “heavy mods”).

[0927] Chemical modifications to RNAs, e.g., gRNAs, sgRNAs, provide protection to the RNA molecule and allow for efficient genomic and base editing. Chemically protected gRNAs can enhance stability and editing efficiency in vivo and ex vivo. Non-limiting examples of suitable chemical modifications include 2′-O-methyl (2′-OMe), phosphorothioate (PS), 2′-O-methyl thioPACE (MSP), 2′-O-methyl-PACE (MP), 2′-fluoro RNA (2′-F-RNA), and constrained ethyl (S-cEt), which may be employed in the synthesis of sgRNAs. In a particular embodiment, the chemical modifications are 2′-O-methyl (2′-OMe) modifications. The modified guide RNAs may improve saCas9 efficacy and also specificity. The effect of an individual modification varies based on the position and combination of chemical modifications used as well as the inter- and intramolecular interactions with other modified nucleotides. By way of example, S-cEt has been used to improve oligonucleotide intramolecular folding.

[0928] Heavy mod designs currently do not exist for Cas orthologs such as saCas9, Cas12, etc., e.g., those which are not SpCas9. Such SpCas9 heavy mods can increase base editing ˜2 fold in vivo. For such modifications, mN=2′-OMe; Ns=phosphorothioate (PS), where “N” represents the term nucleotide, as would be understood by one having skill in the art. In some cases, a nucleotide (N) may contain two modifications, for example, both a 2′-OMe and a PS modification. Representative heavy mods gRNAs (heavy mod series 1 gRNAs for R83C (saCas9), as shown in (1) below) were utilized in experiments in which adult transgenic mice heterozygous for huG6PC-R83C were dosed at a sub-saturating dose of 1 mpk of 1:1 ratio of gRNA:editor mRNA (FIG. 11). The heavy mods as described here provide a new universal approach to increase in vivo base editing that is independent of sequence.

[0929] Provided below are examples of heavy mod gRNA sequences and end mod gRNA sequences. In particular, shown below are sequences in connection with the following: (1) heavy mods series 1; (2) heavy mods series 2; (3) protospacer extension; (4) direct repeat/anti-repeat lengths/sequence context, and the “base” sequences (end mods); and (5) gRNA sequences (end mod sgRNA sequences) designed for correcting the huG6PC-R83C mutation as described and exemplified supra. As will be appreciated by those skilled in the art, Cas9 evolved to use a trans-activating RNA (tracrRNA) that base pairs via an anti-repeat sequence to the repeat sequence of individual crRNAs. A more commonly used single gRNA constitutes a fusion of the tracrRNA and crRNA through a short RNA loop between the repeat-anti-repeat sequences in the Upper Stein (G. Mullally et al., 2020, Nucleic Acids Research, 48(12):6811-6823; M. Jinek et al., 2012, Science, 337:816-821). The direct repeat regions contain sequences for processing pre-crRNA into mature crRNA and tracrRNA binding. The “direct repeat region” combined with the tracrRNA forms the scaffold portion of a gRNA and the “spacer region” forms the target sequence.

[0930] In each of the following sequences, mN=2′OMe; Ns=phosphorothioate, where “N” designates any nucleotide or nucleobase. In the below sequences, “s” indicates that the preceding nucleotide possesses a 3′ phosphorothioate, and the “m” indicates the following nucleotide is a 2′ OMe. A nucleotide with a phosphorothioate and 2′ OMe is denoted as “mNs;” when there are two modifications next to each other, the notation is “mNsmNs.”

1. Heavy mods series 1
gRNA578: 50% modified with 2′OMe
(SEQ ID NO: 404)
mCsmAsmGsmUAUmGmGmACAmCUGUCCAAAmGUUUUmAmGmUACUCmUGmUmAmAmUGmAA
AmAmUmUmACmAGAAUCUACmUmAAAACAAGGCAAmAAUGmCCmGUGUmUmUmAmUmCmUmC
mGmUmCmAmAmCmUmUmGmUmUmGmGmCmGmAmGmAmUsmUsmUsmU
gRNA579: 50% modified, 5′ extended with 3 Us (uridines)
(SEQ ID NO: 405)
mUsmUsmUsCAGmUAUmGmGmACAmCUGUCCAAAmGUUUUmAmGmUACUCmUGmUmAmAmUG
mAAAmAmUmUmACmAGAAUCUACmUmAAAACAAGGCAAmAAUGmCCmGUGUmUmUmAmUmCm
UmCmGmUmCmAmAmCmUmUmGmUmUmGmGmCmGmAmGmAmUsmUsmUsmU
gRNA580: 66% modified
(SEQ ID NO: 404)
mCsmAsGsmUAUmGmGmAmCAmCmUGUCCAAmAmGUmUUmUmAmGmUACUmCmUmGmUmAmA
mUGmAmAmAmAmUmUmACmAmGAAmUCUACmUmAmAAACAAGmGCAAmAAUGmCmCmGUGmU
mUmUmAmUmCmUmCmGmUmCmAmAmCmUmUmGmUmUmGmGmCmGmAmGmAmUsmUsmUsmU
gRNA581: 69% modified
(SEQ ID NO: 404)
mCsmAsGsmUmAUmGmGmAmCAmCUGUCCAAmAmGUUUmUAmGmUACUmCmUmGmUmAmAmU
mGmAmAmAmAmUmUmAmCmAmGmAAmUCUACUmAmAAACAAmGmGmCmAmAmAAUmGmCmCG
UGmUmUmUmAmUmCmUmCmGmUmCmAmAmCmUmUmGmUmUmGmGmCmGmAmGmAmUsmUsmU
smU
gRNA582: 84% modified
(SEQ ID NO: 404)
mCsmAsGsmUmAUmGmGmAmCAmCmUGUCmCmAAmAmGmUmUmUmUmAmGmUAmCmUmCmUm
GmUmAmAmUmGmAmAmAmAmUmUmAmCmAmGmAmAmUCUACmUmAmAmAAmCAmAmGmGmCm
AmAmAAUmGmCmCmGmUGmUmUmUmAmUmCmUmCmGmUmCmAmAmCmUmUmGmUmUmGmGmC
mGmAmGmAmUsmUsmUsmU
2. Heavy mods series 2
gRNA964: 108 nt (longer DR/anti-DR); 24% modified; hairpin (DR/anti-DR) mods only
(SEQ ID NO: 404)
mCsmAsmGsUAUGGACACUGUCCAAAGUUUUAGUACmUmCmUmGmUmAmAmUmGmAmAmAmA
mUmUmAmCmAmGmAAUCUACUAAAACAAGGCAAAAUGCCGUGUUUAUCUCGUCAACUUGUUG
GCGAGAUsmUsmUsmU
gRNA965: 108 nt (longer DR/anti-DR); 48% modified; hairpin (DR/anti-DR) mods + 3′
mods
(SEQ ID NO: 404)
mCsmAsmGsUAUGGACACUGUCCAAAGUUUUAGUACmUmCmUmGmUmAmAmUmGmAmAmAmA
mUmUmAmCmAmGmAAUCUACUAAAACAAGGCAAAAUGCCGUGUmUmUmAmUmCmUmCmGmUm
CmAmAmCmUmUmGmUmUmGmGmCmGmAmGmAmUsmUsmUsmU
gRNA966: 108 nt (longer DR/anti-DR); 53% modified; hairpin (DR/anti-DR) mods + 3′
mods + protospacer mods
(SEQ ID NO: 404)
mCsmAsmGsmUAUmGmGmACAmCUGUCCAAAmGUUUUAGUACmUmCmUmGmUmAmAmUmGmA
mAmAmAmUmUmAmCmAmGmAAUCUACUAAAACAAGGCAAAAUGCCmGUGUmUmUAmUmCmUm
CmGmUmCmAmAmCmUmUmGmUmUmGmGmCmGmAmGmAUsmUsmUsmU
gRNA967: 100 nt (shorter DR/anti-DR); 43% modified; hairpin (DR/anti-DR) mods + 3′
mods
(SEQ ID NO: 406)
mCsmAsmGsUAUGGACACUGUCCAAAGUUUUAGUACmUmCmUmGGmAmAmAmCmAmGmAAUC
UACUAAAACAAGGCAAAAUGCCGUGUmUmUmAmUmCmUmCmGmUmCmAmAmCmUmUmGmUmU
mGmGmCmGmAmGmAmUsmUsmUsmU
gRNA968: 100 nt (shorter DR/anti-DR); 49% modified; hairpin (DR/anti-DR) mods + 3′
mods + protospacer mods
(SEQ ID NO: 406)
mCsmAsmGsmUAUmGmGmACAmCUGUCCAAAmGUUUUAGUACmUmCmUmGmGmAmAmAmCmA
mGmAAUCUACUAAAACAAGGCAAAAUGCCmGUGUmUmUAmUmCmUmCmGmUmCmAmAmCmUm
UmGmUmUmGmGmCmGmAmGmAUsmUsmUsmU
3. Variable length protospacers and sgRNAs
sgRNA_094: 21 nt protospacer
(SEQ ID NO: 407)
mCsmCsmAsGUAUGGACACUGUCCAAAGUUUUAGUACUCUGUAAUGAAAAUUACAGAAUCUA
CUAAAACAAGGCAAAAUGCCGUGUUUAUCUCGUCAACUUGUUGGCGAGAmUsmUsmUsU
sgRNA_095: 22 nt protospacer
(SEQ ID NO: 408)
mAsmCsmCsAGUAUGGACACUGUCCAAAGUUUUAGUACUCUGUAAUGAAAAUUACAGAAUCU
ACUAAAACAAGGCAAAAUGCCGUGUUUAUCUCGUCAACUUGUUGGCGAGAmUsmUsmUsU
sgRNA_096: 23 nt protospacer
(SEQ ID NO: 409)
mCsmAsmCsCAGUAUGGACACUGUCCAAAGUUUUAGUACUCUGUAAUGAAAAUUACAGAAUC
UACUAAAACAAGGCAAAAUGCCGUGUUUAUCUCGUCAACUUGUUGGCGAGAmUsmUsmUsU
sgRNA_097: 34 nt protospacer
(SEQ ID NO: 410)
mCsmCsmASCCAGUAUGGACACUGUCCAAAGUUUUAGUACUCUGUAAUGAAAAUUACAGAAU
CUACUAAAACAAGGCAAAAUGCCGUGUUUAUCUCGUCAACUUGUUGGCGAGAmUsmUsmUsU
4. Modified direct repeat / anti-direct repeat sequences and gRNAs
gRNA868: R83C sgRNA_029 16 bp DR; 104 nt
(SEQ ID NO: 411)
mCsmAsmGsUAUGGACACUGUCCAAAGUUUUAGUACUCUGUAGAAAUACAGAAUCUACUAAA
ACAAGGCAAAAUGCCGUGUUUAUCUCGUCAACUUGUUGGCGAGAUsmUsmUsmU
gRNA869: R83C sgRNA_029 16 bp CG DR; 104 nt
(SEQ ID NO: 412)
mCsmAsmGsUAUGGACACUGUCCAAAGUUUUAGUACUCUGCGGAAACGCAGAAUCUACUAAA
ACAAGGCAAAAUGCCGUGUUUAUCUCGUCAACUUGUUGGCGAGAUsmUsmUsmU
gRNA870: R83C sgRNA_029 14 bp DR ran et al; 100 nt
(SEQ ID NO: 406)
mCsmAsmGsUAUGGACACUGUCCAAAGUUUUAGUACUCUGGAAACAGAAUCUACUAAAACAA
GGCAAAAUGCCGUGUUUAUCUCGUCAACUUGUUGGCGAGAUsmUsmUsmU
gRNA871: R83C sgRNA_029 12 bp DR; 96 nt
(SEQ ID NO: 413)
mCsmAsmGsUAUGGACACUGUCCAAAGUUUUAGUACUCGAAAGAAUCUACUAAAACAAGGCA
AAAUGCCGUGUUUAUCUCGUCAACUUGUUGGCGAGAUsmUsmUsmU
gRNA872: R83C sgRNA_029 12 bp CC DR; 96 nt
(SEQ ID NO: 414)
mCsmAsmGsUAUGGACACUGUCCAAAGUUUUAGUACCCGAAAGCAUCUACUAAAACAAGGCA
AAAUGCCGUGUUUAUCUCGUCAACUUGUUGGCGAGAUsmUsmUsmU
5. End mod sgRNA sequences designed for use in correcting the huG6PC R83C mutation
sgRNA_029
(SEQ ID NO: 415)
mCsmAsmGsUAUGGACACUGUCCAAAGUUUUAGUACUCUGUAAUGAAAAUUACAGAAUCUAC
UAAAACAAGGCAAAAUGCCGUGUUUAUCUCGUCAACUUGUUGGCGAGAUsmUsmUsmU
sgRNA_093
(SEQ ID NO: 415)
mCsmAsmGsUAUGGACACUGUCCAAAGUUUUAGUACUCUGUAAUGAAAAUUACAGAAUCUAC
UAAAACAAGGCAAAAUGCCGUGUUUAUCUCGUCAACUUGUUGGCGAGAmUsmUsmUsU

### Example 6: Materials and Methods

[0931] Materials and methods utilized in the examples and experiments therein as described supra are set forth below.

### Animal Care

[0932] All animal studies were conducted under Taconic's Excluded Flora health standard. To sustain survival of huG6PC-R83C mice, a glucose therapy consisting of daily administered subcutaneous injections of 100-150 ul of 15% glucose per mouse. Glucose injections were not administered to mice post LNP treatment with base-editor mRNA and gRNA.

### In Vivo LNP-Dosing Work-Flow

[0933] To correct the p.R83C mutation in the huG6PC-R83C homozygous mice, LNP co-formulations of base-editor mRNA and gRNA were administered at a 1.5 mpk (milligram per kilogram) dose via the temporal vein of mice at age P1, shortly post birth. Glucose therapy was not administered to LNP-treated mice. LNP-treated mice continued to be cared for alongside littermate controls by the respective birth mother until weaning (21 days), at which point they were phenotyped. For all studies, age matched wild-type and heterozygous huG6PC-R83C littermates were used as controls. At day 21, genomic DNA harvested from livers, growth characteristics, and serum and liver markers were analyzed.

### Lipid Nanoparticle (LNP) Formulations

[0934] The base editor (mRNA encoding the base editor) and guide RNA were co-encapsulated at a 1:1 weight ratio in a lipid nanoparticle. The LNPs were generated by rapidly mixing an aqueous solution of the RNA at a pH of 3.0 with an ethanol solution containing four lipid components: an ionizable lipid, DSPC, cholesterol, and a lipid-anchored PEG. The two solutions were mixed using the benchtop microfluidics device from Precision Nanosystems. Post mixing, the formulations were dialyzed overnight at 4° C. against 1× TBS (Sigma-Aldrich, catalog #94158). They were subsequently concentrated down using 100K MWCO Amicon Ultra centrifugation tubes (Millipore Sigma, catalog #UFC910096), and filtered with 0.2 micron filters (Pall corporation, Catalog #4602). Total RNA concentration of the was determined using Quant-iT Ribogreen (ThermoFisher Scientific, catalog #R11491); particle size was determined by using the Malvern Panalytical Zetasizer.

### Next Generation Sequencing (NGS)

[0935] Next generation sequencing (NGS) was used to determine the frequency of base-edited alleles in genomic DNA from whole liver extracts of LNP-treated animals. Following LNP-treatment, mice were euthanized, and the entire liver was removed and snap frozen in liquid nitrogen. Frozen mouse livers were ground to a powder form using Geno/Grinder 2010 (Ops Diagnostics, Lebanon, NJ, USA), and genomic DNA was isolated from the liver powder using Quick Extract lysis buffer according to manufacture's specifications. Genomic DNA was directly used in subsequent PCR amplification steps to produce a ˜170-nucleotide fragment harboring huG6PC exon 2 using the primer pair: Forward primer, GGGCATTAAACTCCTTTGGG (SEQ ID NO: 393) and reverse primer, AGTCTCACAGGTTACAGGGA (SEQ ID NO: 394). NGS adapters were added, and the resulting amplicons were sequenced using an Illumina MiSeq instrument according to the manufacturer's instructions.

### Serum Metabolites

[0936] To measure serum metabolites, blood was collected from R83C humanized transgenic mice. Serum was then separated and extracted from whole blood, which was subsequently used for metabolite assays. For a relevant and comprehensive post-study assessment, serum glucose, serum cholesterol, and serum triglycerides were all analyzed. Serum glucose and serum cholesterol were measured using ThermoFisher Scientific (Waltham, MA, USA) Infinity Glucose Liquid Stable Reagent (Cat #: TR15421) and Infinity Cholesterol Liquid Stable Reagent (Cat #: TR13421), respectively. Serum triglycerides were measured using the Serum Triglyceride Quantification Kit (Cat #: MAK266) from Sigma-Aldrich (St. Louis, MO, USA). Uric acid was measured using the Uric Acid Liquid Stable Reagent per manufacturer specifications (Thermo Fisher Scientific (Waltham, MA, USA). Serum lactate was analyzed using the EnzyFluo L-Lactate Assay Kit from BioAssay Systems (Hayward, CA, USA).

[0937] Fasting blood glucose analysis of mice involved blood sampling via the tail vein pre- and post-24 hours after food deprivation. Blood glucose levels were measured using the HemoCue Glucose 201 System (HemoCue America, CA, USA).

### Glucose-6-Phosphatase-Alpha Activity Assay

[0938] Liver microsome isolation and microsomal phosphohydrolase assays were performed as described by Lei, K.-J., et al., 1996, Nature Genetics, 13(2):203-9. Assay methodology in Arnaotova et al. (2021, Mol. Therapy., Vol. 29, No 4) is described as follows: “Glucose-6-phosphatase dependent substrate transport in the glycogen storage disease type-1a mouse. Nat. Genet. 13, 203-209). In phosphoydrolase assays, reaction mixtures (50 uL) containing 50 mM sodium cacodylate buffer (pH 6.5), 2 mM EDTA, 10 mM Glucose-6-phosphate (G6P), and appropriate amounts of microsomal preparations were incubated at 30° C. for 10 minutes. Disrupted microsomal membranes were prepared by incubating intact membranes in 0.2% deoxycholate for 20 minutes at 4° C. Non-specific phosphatase activity was estimated by pre-incubating disrupted microsomal preparations at pH 5 for 10 minutes at 37° C. to inactivate the acid-labile G6Pase-alpha. One unit of G6Pase-alpha activity represents one nmol G6P hydrolysis per minute per mg microsomal protein. The lower level of quantitation for the microsomal G6Pase-alpha assay is 2 units.”

[0939] Enzyme histochemical analysis of G6Pase-alpha was performed as described in Lee, Y. M., Jun, H. S. Pan, C.-J. Lin, S. R., Wilson, L. H., Mansfield, B. C., and Chou, J. Y. (2012). Prevention of hepatocyellular adenoma and correction of metabolic abnormalities in murine glycogen storage disease type Ia by gene therapy. Hepatology 56, 1719-1729. As described in Arnaotova et al., (2021, Mol. Therapy., Vol. 29, No 4), 10 um-thick liver tissue sections were incubated for 10 min at room temperature in a solution containing 40 mM Tris-maleate (pH 6.5), 10 mM G6P, 300 mM sucrose, and 3.6 mM lead nitrate. After rinsing, liver sections were incubated for 2 min at room temperature in 0.09% ammonium sulfide solution, and the trapped lead phosphate was visualized following conversion to the brown-colored lead sulfide.

### Immunohistochemistry

[0940] Immunohistochemical procedures were performed as described in Arnaotova et al., 2021, Mol. Therapy., Vol. 29, No 4. In brief, H&E staining was performed on liver sections preserved in 10% neutral buffered formalin, and Oil Red O staining was performed on cryopreserved optimal cutting temperature compound (OCT) embedded liver sections following standard procedures. The stained sections were visualized using the Imager A2m microscope with Axiocam 506 camera and Zen 2.6 software (Carl Zeiss, White Plains, NY, USA).

### Other Embodiments

[0941] From the foregoing description, it will be apparent that variations and modifications may be made to the embodiments as described herein to be adopted to various usages and conditions. Such embodiments are also within the scope of the following claims.

[0942] The recitation of a listing of elements in any definition of a variable herein includes definitions of that variable as any single element or combination (or subcombination) of listed elements. The recitation of an embodiment herein includes that embodiment as any single embodiment or in combination with any other embodiments or portions thereof.

[0943] All publications, patents, and patent applications mentioned in this specification are herein incorporated by reference to the same extent as if each individual publication, patent, or patent application was specifically and individually indicated to be incorporated by reference. Absent any indication otherwise, publications, patents, and patent applications mentioned in this specification are incorporated herein by reference in their entireties.

1. An adenosine deaminase variant comprising a glycine (G) at amino acid position 82, a threonine (T) or an aspartic acid (D) at amino acid position 147, a serine (S) at amino acid position 154, and one or more of a histidine (H) at amino acid position 36, a tyrosine at amino acid position 76, a tyrosine at amino acid position 149, a lysine (K) at amino acid position 157, and an asparagine (N) at amino acid position 167 of the following amino acid sequence, wherein the adenosine deaminase has at least about 85% identity to said amino acid sequence: MSEVEFSHEYWMRHALTLAKRARDEREVPVGAVLVLNNRVIGEGWNRAIGLHDPTAHAEIMALR QGGLVMQNYRLIDATLYVTFEPCVMCAGAMIHSRIGRVVFGVRNAKTGAAGSLMDVLHYPGMNH RVEITEGILADECAALLCYFFRMPRQVFNAQKKAQSSTD (SEQ ID NO: 1), or corresponding alterations in another adenosine deaminase.

2. An adenosine deaminase variant comprising any of the following combinations of alterations
a) I76Y+V82G+Y147T+Q154S;
b) L36H+V82G+Y147T+Q154S+N157K;
c) V82G+Y147D+F149Y+Q154S+D167N;
d) L36H+V82G+Y147D+F149Y+Q154S+N157K+D167N;
e) L36H+I76Y+V82G+Y147T+Q154S+N157K;
f) I76Y+V82G+Y147D+F149Y+Q154S+D167N;
g) Y147D+F149Y+D167N;
h) L36H; I76Y; V82G; Q154S; and N157K;
i) I76Y; V82G; Q154S; or
j) L36H+I76Y+V82G+Y147D+F149Y+Q154S+N157K+D167N with reference to SEQ ID NO: 1: MSEVEFSHEYWMRHALTLAKRARDEREVPVGAVLVLNNRVIGEGWNRAIGLHDPTAHAEIMALR QGGLVMQNYRLIDATLYVTFEPCVMCAGAMIHSRIGRVVFGVRNAKTGAAGSLMDVLHYPGMNH RVEITEGILADECAALLCYFFRMPRQVFNAQKKAQSSTD (SEQ ID NO: 1), or corresponding combinations of alterations in another adenosine deaminase.

3. The adenosine deaminase variant of claim 1, comprising the following combination of alterations I76Y+V82G+Y147D+F149Y+Q154S+D167N of SEQ ID NO: 1, or corresponding alterations in another adenosine deaminase.

4. The adenosine deaminase variant of claim 1, wherein the adenosine deaminase has at least about 90% identity to SEQ ID NO: 1.

5-6. (canceled)

7. A fusion protein or complex comprising a polynucleotide programmable DNA binding domain and at least one adenosine deaminase variant domain, wherein the adenosine deaminase variant domain comprises a glycine (G) at amino acid position 82, a threonine (T) or an aspartic acid (D) at amino acid position 147, a serine (S) at amino acid position 154, and one or more of a histidine (H) at amino acid position 36, a tyrosine at amino acid position 76, a tyrosine at amino acid position 149, a lysine (K) at amino acid position 157, and an asparagine (N) at amino acid position 167 of the following amino acid sequence, wherein the adenosine deaminase has at least about 85% identity to said amino acid sequence MSEVEFSHEYWMRHALTLAKRARDEREVPVGAVLVLNNRVIGEGWNRAIGLHDPTAHAEIMALR QGGLVMQNYRLIDATLYVTFEPCVMCAGAMIHSRIGRVVFGVRNAKTGAAGSLMDVLHYPGMNH RVEITEGILADECAALLCYFFRMPRQVFNAQKKAQSSTD (SEQ ID NO: 1), or corresponding alterations in another adenosine deaminase.

8-10. (canceled)

11. The fusion protein or complex of claim 1 comprising a polynucleotide programmable DNA binding domain and at least one adenosine deaminase variant domain, wherein the adenosine deaminase variant domain comprises any of the following combinations of alterations
a) I76Y+V82G+Y147T+Q154S;
b) L36H+V82G+Y147T+Q154S+N157K;
c) V82G+Y147D+F149Y+Q154S+D167N;
d) L36H+V82G+Y147D+F149Y+Q154S+N157K+D167N;
e) L36H+I76Y+V82G+Y147T+Q154S+N157K;
f) I76Y+V82G+Y147D+F149Y+Q154S+D167N;
g) Y147D+F149Y+D167N;
h) L36H; I76Y; V82G; Q154S; and N157K;
i) I76Y; V82G; Q154S; or
j) L36H+I76Y+V82G+Y147D+F149Y+Q154S+N157K+D167N
with reference to SEQ ID NO: 1: MSEVEFSHEYWMRHALTLAKRARDEREVPVGAVLVLNNRVIGEGWNRAIGLHDPTAHAEIMALR QGGLVMQNYRLIDATLYVTFEPCVMCAGAMIIHSRIGRVVFGVRNAKTGAAGSLMDVLHYPGMNH RVEITEGILADECAALLCYFFRMPRQVFNAQKKAQSSTD (SEQ ID NO: 1), or corresponding combinations of alterations in another adenosine deaminase.

12-14. (canceled)

15. The fusion protein or complex of claim 7, wherein the fusion protein comprises a TadA*7.10 adenosine deaminase domain and an adenosine deaminase variant domain; or wherein the polynucleotide programmable DNA binding domain is a Cas9 domain.

16-18. (canceled)

19. The fusion protein or complex of claim 7, wherein the polynucleotide programmable DNA binding domain comprises a modified SaCas9 having an altered protospacer-adjacent motif (PAM) specificity;
wherein the SaCas9 has protospacer-adjacent motif (PAM) specificity for the nucleic acid sequence 5′-NNGRRT-3′ or 5′-GAGAAT-3′, and wherein the SaCas9 is a nuclease active SaCas9, a nuclease inactive SaCas9 (SaCas9d), or a SaCas9 nickase (SaCas9n);
wherein the linker comprises the amino acid sequence: SGGSSGGSSGSETPGTSESATPES (SEQ ID NO: 359); and
further comprises one or more nuclear localization signals.

20-30. (canceled)

31. A base editor system comprising the fusion protein or complex of claim 7, and one or more guide polynucleotides.

32-41. (canceled)

42. The base editor system of claim 31, wherein the guide polynucleotide comprises or consists essentially of one of the following sequences:
(SEQ ID NO: 409)
mCsmAsmCsCAGUAUGGACACUGUCCAAAGUUUUAGUACUCUGUAAUGAA
AAUUACAGAAUCUACUAAAACAAGGCAAAAUGCCGUGUUUAUCUCGUCAA
CUUGUUGGCGAGAmUsmUsmUsU
or
(SEQ ID NO: 410)
mCsmCsmASCCAGUAUGGACACUGUCCAAAGUUUUAGUACUCUGUAAUGA
AAAUUACAGAAUCUACUAAAACAAGGCAAAAUGCCGUGUUUAUCUCGUCA
ACUUGUUGGCGAGAmUsmUsmUSU,
wherein “m” denotes a 2′-O-methyl and “s” denotes a phosphorothioate; or
wherein the guide polynucleotide comprises a nucleic acid sequence, in 5′ to 3′ orientation, selected from CCACCAGUAUGGACACUGUC (SEQ ID NO: 371); CACCAGUAUGGACACUGUCC (SEQ ID NO: 372); ACCAGUAUGGACACUGUCCA (SEQ ID NO: 373); CCAGUAUGGACACUGUCCAA (SEQ ID NO: 374); CAGUAUGGACACUGUCCAAA (SEQ ID NO: 370); AGUAUGGACACUGUCCAAAG (SEQ ID NO: 375); GUAUGGACACUGUCCAAAGA (SEQ ID NO: 376); or UAUGGACACUGUCCAAAGAG (SEQ ID NO: 377).

43-44. (canceled)

45. A polynucleotide encoding the adenosine deaminase variant of claim 1.

46-48. (canceled)

49. A cell comprising the polynucleotide of claim 45.

50. A cell comprising the adenosine deaminase variant of claim 1.

51-56. (canceled)

57. A method of treating a genetic disease in a subject in need thereof, the method comprising administering to a cell of the subject the base editor system of claim 31 or a polynucleotide encoding the base editor system.

58. A method of treating a genetic disease in a subject in need thereof, the method comprising administering to the subject the cell of claim 49.

59. The method of claim 57, wherein after treatment the cell expresses a G6PC polypeptide capable of catalyzing the hydrolysis of D-glucose 6-phosphate to D-glucose and orthophosphate.

60. (canceled)

61. A method for correcting a single nucleotide polymorphism (SNP) in a polynucleotide, the method comprising:
contacting a target nucleotide sequence, at least a portion of which is located in the polynucleotide or its reverse complement, with the base editor system of claim 31 and editing the SNP by deaminating the SNP or its complement nucleobase upon targeting of the base editor to the target nucleotide sequence, wherein deaminating the SNP or its complement nucleobase corrects the SNP.

62. The method of claim 61, wherein the SNP is associated with Glycogen Storage Disease Type 1a (GSD1a).

63. (canceled)

64. A method of editing a glucose-6-phosphatase (G6PC) polynucleotide comprising a single nucleotide polymorphism (SNP) associated with Glycogen Storage Disease Type 1a (GSD1a), the method comprising contacting the G6PC polynucleotide with a fusion protein or complex of claim 7 in a complex with one or more guide polynucleotides, wherein one or more of the guide polynucleotides targets the base editor to effect an A·T to G·C alteration of the SNP associated with GSD1a.

65. (canceled)

66. The method of claim 57, wherein the SNP changes a glutamine (Q) to a non-glutamine (X) amino acid or changes an arginine (R) to a non-arginine (X) in a G6PC polypeptide; wherein the SNP results in expression of an G6PC polypeptide having a non-glutamine (X) amino acid at position 347 or a non-arginine (X) amino acid at position 83; wherein the base editor correction replaces the non-glutamine amino acid (X) at position 347 with a glutamine or the non-arginine amino acid (X) at position 83 with an arginine; wherein the SNP results in expression of a G6PC polypeptide that prematurely terminates at amino acid position 347 or at a cysteine at position 83; wherein the SNP encodes one or more of Q347X and/or R83C.

67-72. (canceled)

73. The method of claim 64, wherein the guide polynucleotide comprises a nucleic acid sequence, from 5′-3′, selected from the group consisting of CAGUAUGGACACUGUCCAAA (SEQ ID NO: 370); CCACCAGUAUGGACACUGUC (SEQ ID NO: 371); CACCAGUAUGGACACUGUCC (SEQ ID NO: 372); ACCAGUAUGGACACUGUCCA (SEQ ID NO: 373); CCAGUAUGGACACUGUCCAA (SEQ ID NO: 374); AGUAUGGACACUGUCCAAAG (SEQ ID NO: 375); GUAUGGACACUGUCCAAAGA (SEQ ID NO: 376); and UAUGGACACUGUCCAAAGAG (SEQ ID NO: 377).

74. (canceled)

75. A vector comprising the polynucleotide of claim 45.

76-77. (canceled)

78. A composition comprising the fusion protein or complex of claim 7.

79-81. (canceled)

82. A composition comprising the polynucleotide of claim 45.

83. (canceled)

84. A composition comprising the cell of claim 49.

85-87. (canceled)

88. A kit comprising the fusion protein or complex of claim 7.

89-92. (canceled)

93. A modified guide RNA (gRNA) comprising modified nucleotides, wherein the guide comprises from 5′ to 3′ a polynucleotide sequence selected from the group consisting of:
(SEQ ID NO: 404)
CAGUAUGGACACUGUCCAAAGUUUUAGUACUCUGUAAUGAAAAUUACAGA
AUCUACUAAAACAAGGCAAAAUGCCGUGUUUAUCUCGUCAACUUGUUGGC
GAGAUUUU;
(SEQ ID NO: 405)
UUUCAGUAUGGACACUGUCCAAAGUUUUAGUACUCUGUAAUGAAAAUUAC
AGAAUCUACUAAAACAAGGCAAAAUGCCGUGUUUAUCUCGUCAACUUGUU
GGCGAGAUUUU;
(SEQ ID NO: 406)
CAGUAUGGACACUGUCCAAAGUUUUAGUACUCUGGAAACAGAAUCUACUA
AAACAAGGCAAAAUGCCGUGUUUAUCUCGUCAACUUGUUGGCGAGAUUU
U;
(SEQ ID NO: 407)
CCAGUAUGGACACUGUCCAAAGUUUUAGUACUCUGUAAUGAAAAUUACAG
AAUCUACUAAAACAAGGCAAAAUGCCGUGUUUAUCUCGUCAACUUGUUGG
CGAGAUUUU;
(SEQ ID NO: 408)
ACCAGUAUGGACACUGUCCAAAGUUUUAGUACUCUGUAAUGAAAAUUACA
GAAUCUACUAAAACAAGGCAAAAUGCCGUGUUUAUCUCGUCAACUUGUUG
GCGAGAUUUU;
(SEQ ID NO: 409)
CACCAGUAUGGACACUGUCCAAAGUUUUAGUACUCUGUAAUGAAAAUUAC
AGAAUCUACUAAAACAAGGCAAAAUGCCGUGUUUAUCUCGUCAACUUGUU
GGCGAGAUUUU;
(SEQ ID NO: 410)
CCACCAGUAUGGACACUGUCCAAAGUUUUAGUACUCUGUAAUGAAAAUUA
CAGAAUCUACUAAAACAAGGCAAAAUGCCGUGUUUAUCUCGUCAACUUGU
UGGCGAGAUUUU;
(SEQ ID NO: 411)
CAGUAUGGACACUGUCCAAAGUUUUAGUACUCUGUAGAAAUACAGAAUCU
ACUAAAACAAGGCAAAAUGCCGUGUUUAUCUCGUCAACUUGUUGGCGAGA
UUUU;
(SEQ ID NO: 412)
CAGUAUGGACACUGUCCAAAGUUUUAGUACUCUGCGGAAACGCAGAAUCU
ACUAAAACAAGGCAAAAUGCCGUGUUUAUCUCGUCAACUUGUUGGCGAGA
UUUU;
(SEQ ID NO: 413)
CAGUAUGGACACUGUCCAAAGUUUUAGUACUCGAAAGAAUCUACUAAAAC
AAGGCAAAAUGCCGUGUUUAUCUCGUCAACUUGUUGGCGAGAUUUU;
(SEQ ID NO: 414)
CAGUAUGGACACUGUCCAAAGUUUUAGUACCCGAAAGCAUCUACUAAAAC
AAGGCAAAAUGCCGUGUUUAUCUCGUCAACUUGUUGGCGAGAUUUU;
and
(SEQ ID NO: 415)
CAGUAUGGACACUGUCCAAAGUUUUAGUACUCUGUAAUGAAAAUUACAGA
AUCUACUAAAACAAGGCAAAAUGCCGUGUUUAUCUCGUCAACUUGUUGGC
GAGAUUUU.

94-112. (canceled)

113. A modified guide RNA (gRNA) comprising a nucleic acid sequence, from 5′ to 3′, selected from
(SEQ ID NO: 404)
mCsmAsmGsmUAUmGmGmACAmCUGUCCAAAmGUUUUmAmGmUACUCmUG
mUmAmAmUGmAAAmAmUmUmACmAGAAUCUACmUmAAAACAAGGCAAmAAUGm
CCmGUGUmUmUmAmUmCmUmCmGmUmCmAmAmCmUmUmGmUmUmGmGmCmGm
AmGmAmUsmUsmUsmU;
(SEQ ID NO: 405)
mUsmUsmUsCAGmUAUmGmGmACAmCUGUCCAAAmGUUUUmAmGmUACUC
mUGmUmAmAmUGmAAAmAmUmUmACmAGAAUCUACmUmAAAACAAGGCAAmAA
UGmCCmGUGUmUmUmAmUmCmUmCmGmUmCmAmAmCmUmUmGmUmUmGmGmC
mGmAmGmAmUsmUsmUsmU;
(SEQ ID NO: 404)
mCsmAsGsmUAUmGmGmAmCAmCmUGUCCAAmAmGUmUUmUmAmGmUACU
mCmUmGmUmAmAmUGmAmAmAmAmUmUmACmAmGAAmUCUACmUmAmAAACA
AGmGCAAmAAUGmCmCmGUGmUmUmUmAmUmCmUmCmGmUmCmAmAmCmUmU
mGmUmUmGmGmCmGmAmGmAmUsmUsmUsmU;
(SEQ ID NO: 404)
mCsmAsGsmUmAUmGmGmAmCAmCUGUCCAAmAmGUUUmUAmGmUACUmC
mUmGmUmAmAmUmGmAmAmAmAmUmUmAmCmAmGmAAmUCUACUmAmAAACA
AmGmGmCmAmAmAAUmGmCmCGUGmUmUmUmAmUmCmUmCmGmUmCmAmAmC
mUmUmGmUmUmGmGmCmGmAmGmAmUsmUsmUsmU;
or
(SEQ ID NO: 404)
mCsmAsGsmUmAUmGmGmAmCAmCmUGUCmCmAAmAmGmUmUmUmUmAmG
mUAmCmUmCmUmGmUmAmAmUmGmAmAmAmAmUmUmAmCmAmGmAmAmUCUA
CmUmAmAmAAmCAmAmGmGmCmAmAmAAUmGmCmCmGmUGmUmUmUmAmUmC
mUmCmGmUmCmAmAmCmUmUmGmUmUmGmGmCmGmAmGmAmUsmUsmUsmU,
wherein “m” denotes a 2′-O-methyl and “s” denotes a phosphorothioate; or
selected from
(SEQ ID NO: 404)
mCsmAsmGsUAUGGACACUGUCCAAAGUUUUAGUACmUmCmUmGmUmAmAmUmG
mAmAmAmAmUmUmAmCmAmGmAAUCUACUAAAACAAGGCAAAAUGCCGUGUUU
AUCUCGUCAACUUGUUGGCGAGAUsmUsmUsmU;
(SEQ ID NO: 404)
mCsmAsmGsUAUGGACACUGUCCAAAGUUUUAGUACmUmCmUmGmUmAmA
mUmGmAmAmAmAmUmUmAmCmAmGmAAUCUACUAAAACAAGGCAAAAUGCCGU
GUmUmUmAmUmCmUmCmGmUmCmAmAmCmUmUmGmUmUmGmGmCmGmAmGmA
mUsmUsmUsmU;
(SEQ ID NO: 404)
mCsmAsmGsmUAUmGmGmACAmCUGUCCAAAmGUUUUAGUACmUmCmUmG
mUmAmAmUmGmAmAmAmAmUmUmAmCmAmGmAAUCUACUAAAACAAGGCAAAA
UGCCmGUGUmUmUAmUmCmUmCmGmUmCmAmAmCmUmUmGmUmUmGmGmCmG
mAmGmAUsmUsmUsmU;
(SEQ ID NO: 406)
mCsmAsmGsUAUGGACACUGUCCAAAGUUUUAGUACmUmCmUmGGmAmAm
AmCmAmGmAAUCUACUAAAACAAGGCAAAAUGCCGUGUmUmUmAmUmCmUmCm
GmUmCmAmAmCmUmUmGmUmUmGmGmCmGmAmGmAmUsmUsmUsmU;
(SEQ ID NO: 406)
mCsmAsmGsmUAUmGmGmACAmCUGUCCAAAmGUUUUAGUACmUmCmUmG
mGmAmAmAmCmAmGmAAUCUACUAAAACAAGGCAAAAUGCCmGUGUmUmUAmU
mCmUmCmGmUmCmAmAmCmUmUmGmUmUmGmGmCmGmAmGmAUsmUsmUsmU,
wherein “m” denotes a 2′-O-methyl and “s” denotes a phosphorothioate;
selected from
(SEQ ID NO: 407)
mCsmCsmAsGUAUGGACACUGUCCAAAGUUUUAGUACUCUGUAAUGAAAAU
UACAGAAUCUACUAAAACAAGGCAAAAUGCCGUGUUUAUCUCGUCAACUUGUUG
GCGAGAmUsmUsmUsU;
(SEQ ID NO: 408)
mAsmCsmCsAGUAUGGACACUGUCCAAAGUUUUAGUACUCUGUAAUGAAAA
UUACAGAAUCUACUAAAACAAGGCAAAAUGCCGUGUUUAUCUCGUCAACUUGUU
GGCGAGAmUsmUsmUsU;
(SEQ ID NO: 409)
mCsmAsmCsCAGUAUGGACACUGUCCAAAGUUUUAGUACUCUGUAAUGAAA
AUUACAGAAUCUACUAAAACAAGGCAAAAUGCCGUGUUUAUCUCGUCAACUUGU
UGGCGAGAmUsmUsmUsU;
or
(SEQ ID NO: 410)
mCsmCsmAsCCAGUAUGGACACUGUCCAAAGUUUUAGUACUCUGUAAUGAA
AAUUACAGAAUCUACUAAAACAAGGCAAAAUGCCGUGUUUAUCUCGUCAACUUG
UUGGCGAGAmUsmUsmUsU, wherein “m” denotes a 2′-O-methyl and “s”
denotes a phosphorothioate; selected from
(SEQ ID NO: 411)
mCsmAsmGsUAUGGACACUGUCCAAAGUUUUAGUACUCUGUAGAAAUACAG
AAUCUACUAAAACAAGGCAAAAUGCCGUGUUUAUCUCGUCAACUUGUUGGCGAG
AUsmUsmUsmU;
(SEQ ID NO: 412)
mCsmAsmGsUAUGGACACUGUCCAAAGUUUUAGUACUCUGCG GAAA
CGCAGAAUCUACUAAAACAAGGCAAAAUGCCGUGUUUAUCUCGUCAACUUGUUG
GCGAGAUsmUsmUsmU;
(SEQ ID NO: 406)
mCsmAsmGsUAUGGACACUGUCCAAAGUUUUAGUACUCUGGAAACAGAAUC
UACUAAAACAAGGCAAAAUGCCGUGUUUAUCUCGUCAACUUGUUGGCGAGAUsmU
smUsmU;
(SEQ ID NO: 413)
mCsmAsmGsUAUGGACACUGUCCAAAGUUUUAGUACUCGAAAGAAUCUACU
AAAACAAGGCAAAAUGCCGUGUUUAUCUCGUCAACUUGUUGGCGAGAUsmUsmUs
mU;
(SEQ ID NO: 414)
mCsmAsmGsUAUGGACACUGUCCAAAGUUUUAGUACCCGAAAGCAUCUACU
AAAACAAGGCAAAAUGCCGUGUUUAUCUCGUCAACUUGUUGGCGAGAUsmUsmUs
mU[[]], wherein “m” denotes a 2′-O-methyl and “s” denotes a
phosphorothioate; or selected from
(SEQ ID NO: 415)
mCsmAsmGsUAUGGACACUGUCCAAAGUUUUAGUACUCUGUAAUGAAAAUU
ACAGAAUCUACUAAAACAAGGCAAAAUGCCGUGUUUAUCUCGUCAACUUGUUGG
CGAGAUsmUsmUsmU;
or
(SEQ ID NO: 415)
mCsmAsmGsUAUGGACACUGUCCAAAGUUUUAGUACUCUGUAAUGAAAAUU
ACAGAAUCUACUAAAACAAGGCAAAAUGCCGUGUUUAUCUCGUCAACUUGUUGG
CGAGAmUsmUsmUsU, wherein “m” denotes a 2′-O-methyl and “s”
denotes a phosphorothioate.
wherein “m” denotes a 2′-O-methyl and “s” denotes a phosphorothioate.

114-117. (canceled)

118. A formulation comprising a lipid nanoparticle comprising an mRNA expressing a base editor and a gRNA, wherein the base editor comprises a Cas9 domain and at least one adenosine deaminase variant comprising V82G, Y147T/D, Q154S, and one or more of L36H, I76Y, F149Y, N157K, and D167N with reference to SEQ ID NO: 1: MSEVEFSHEYWMRHALTLAKRARDEREVPVGAVLVLNNRVIGEGWNRAIGLHDPTAHAEIMALR QGGLVMQNYRLIDATLYVTFEPCVMCAGAMIHSRIGRVVFGVRNAKTGAAGSLMDVLHYPGMNH RVEITEGILADECAALLCYFFRMPRQVFNAQKKAQSSTD (SEQ ID NO: 1), or corresponding alterations in another adenosine deaminase; and the gRNA comprises
(SEQ ID NO: 370)
CAGUAUGGACACUGUCCAAA.

119. A formulation comprising a lipid nanoparticle comprising an mRNA expressing a base editor, wherein the base editor comprises a Cas9 domain and at least one adenosine deaminase variant comprising V82G, Y147T/D, Q154S, and one or more of L36H, I76Y, F149Y, N157K, and D167N with reference to SEQ ID NO: 1: MSEVEFSHEYWMRHALTLAKRARDEREVPVGAVLVLNNRVIGEGWNRAIGLHDPTAHAEIMALR QGGLVMQNYRLIDATLYVTFEPCVMCAGAMIHSRIGRVVFGVRNAKTGAAGSLMDVLHYPGMNH RVEITEGILADECAALLCYFFRMPRQVFNAQKKAQSSTD (SEQ ID NO: 1), or corresponding alterations in another adenosine deaminase; and a gRNA comprising
(SEQ ID NO: 370)
CAGUAUGGACACUGUCCAAA.

120-124. (canceled)

The application's sequence listing, which the Patent Office published only in electronic form, follows.

SEQUENCE LISTING (427 sequences)

SEQ ID NO: 1 - protein, 167 aa, Escherichia coli
  misc_feature (1)..(167): TadA*7.10 (ecTadA) polypeptide sequence
MSEVEFSHEYWMRHALTLAKRARDEREVPVGAVLVLNNRVIGEGWNRAIGLHDPTAHAEIMALRQGGLVMQNYRLIDATLYVTFEPCVMCAGAMIHSRIGRVVFGVRNAKTGAAGSLMDVLHYPGMNHRVEITEGILADECAALLCYFFRMPRQVFNAQKKAQSSTD

SEQ ID NO: 2 - DNA, 4092 bp, Artificial Sequence
  Description of artificial sequence: BhCas12b GGSGGS-ABE8-Xten20 at P153 polynucleotide sequence
  misc_feature (1)..(6): Kozak sequence
  misc_feature (7)..(57): Sequence encoding N-terminal nuclear localization signal
  misc_feature (58)..(513): Sequence encoding BhCas12b
  misc_feature (514)..(531): Sequence encoding a linker
  misc_feature (532)..(1029): Sequence encoding TadA*8
  misc_feature (1030)..(1089): Sequence encoding Xten20 linker
  misc_feature (1090)..(3954): Sequence encoding BhCas12b
  misc_feature (3955)..(4002): Sequence encoding C-terminal NLS
  misc_feature (4003)..(4008): Seqquence encoding GS linker
  misc_feature (4009)..(4089): Sequence encoding 3x hemagglutinin (HA) tag
gccaccatggccccaaagaagaagcggaaggtcggtatccacggagtcccagcagccgccaccagatccttcatcctgaagatcgagcccaacgaggaagtgaagaaaggcctctggaaaacccacgaggtgctgaaccacggaatcgcctactacatgaatatcctgaagctgatccggcaagaggccatctacgagcaccacgagcaggaccccaagaatcccaagaaggtgtccaaggccgagatccaggccgagctgtgggatttcgtgctgaagatgcagaagtgcaacagcttcacacacgaggtggacaaggacgaggtgttcaacatcctgagagagctgtacgaggaactggtgcccagcagcgtggaaaagaagggcgaagccaaccagctgagcaacaagtttctgtaccctctggtggaccccaacagccagtctggaaagggaacagccagcagcggcagaaagcccagatggtacaacctgaagattgccggcgatcccggaggctctggaggaagctccgaagtcgagttttcccatgagtactggatgagacacgcattgactctcgcaaagagggctcgagatgaacgcgaggtgcccgtgggggcagtactcgtgctcaacaatcgcgtaatcggcgaaggttggaatagggcaatcggactccacgaccccactgcacatgcggaaatcatggcccttcgacagggagggcttgtgatgcagaattatcgactttatgatgcgacgctgtacgtcacgtttgaaccttgcgtaatgtgcgcgggagctatgattcactcccgcattggacgagttgtattcggtgttcgcaacgccaagacgggtgccgcaggttcactgatggacgtgctgcatcatccaggcatgaaccaccgggtagaaatcacagaaggcatattggcggacgaatgtgcggcgctgttgtgtcgtttttttcgcatgcccaggcgggtctttaacgcccagaaaaaagcacaatcctctactgacggctcttctggatctgaaacacctggcacaagcgagagcgccacccctgagagctctggctcctgggaagaagagaagaagaagtgggaagaagataagaaaaaggacccgctggccaagatcctgggcaagctggctgagtacggactgatccctctgttcatcccctacaccgacagcaacgagcccatcgtgaaagaaatcaagtggatggaaaagtcccggaaccagagcgtgcggcggctggataaggacatgttcattcaggccctggaacggttcctgagctgggagagctggaacctgaaagtgaaagaggaatacgagaaggtcgagaaagagtacaagaccctggaagagaggatcaaagaggacatccaggctctgaaggctctggaacagtatgagaaagagcggcaagaacagctgctgcgggacaccctgaacaccaacgagtaccggctgagcaagagaggccttagaggctggcgggaaatcatccagaaatggctgaaaatggacgagaacgagccctccgagaagtacctggaagtgttcaaggactaccagcggaagcaccctagagaggccggcgattacagcgtgtacgagttcctgtccaagaaagagaaccacttcatctggcggaatcaccctgagtacccctacctgtacgccaccttctgcgagatcgacaagaaaaagaaggacgccaagcagcaggccaccttcacactggccgatcctatcaatcaccctctgtgggtccgattcgaggaaagaagcggcagcaacctgaacaagtacagaatcctgaccgagcagctgcacaccgagaagctgaagaaaaagctgacagtgcagctggaccggctgatctaccctacagaatctggcggctgggaagagaagggcaaagtggacattgtgctgctgcccagccggcagttctacaaccagatcttcctggacatcgaggaaaagggcaagcacgccttcacctacaaggatgagagcatcaagttccctctgaagggcacactcggcggagccagagtgcagttcgacagagatcacctgagaagataccctcacaaggtggaaagcggcaacgtgggcagaatctacttcaacatgaccgtgaacatcgagcctacagagtccccagtgtccaagtctctgaagatccaccgggacgacttccccaaggtggtcaacttcaagcccaaagaactgaccgagtggatcaaggacagcaagggcaagaaactgaagtccggcatcgagtccctggaaatcggcctgagagtgatgagcatcgacctgggacagagacaggccgctgccgcctctattttcgaggtggtggatcagaagcccgacatcgaaggcaagctgtttttcccaatcaagggcaccgagctgtatgccgtgcacagagccagcttcaacatcaagctgcccggcgagacactggtcaagagcagagaagtgctgcggaaggccagagaggacaatctgaaactgatgaaccagaagctcaacttcctgcggaacgtgctgcacttccagcagttcgaggacatcaccgagagagagaagcgggtcaccaagtggatcagcagacaagagaacagcgacgtgcccctggtgtaccaggatgagctgatccagatccgcgagctgatgtacaagccttacaaggactgggtcgccttcctgaagcagctccacaagagactggaagtcgagatcggcaaagaagtgaagcactggcggaagtccctgagcgacggaagaaagggcctgtacggcatctccctgaagaacatcgacgagatcgatcggacccggaagttcctgctgagatggtccctgaggcctaccgaacctggcgaagtgcgtagactggaacccggccagagattcgccatcgaccagctgaatcacctgaacgccctgaaagaagatcggctgaagaagatggccaacaccatcatcatgcacgccctgggctactgctacgacgtgcggaagaagaaatggcaggctaagaaccccgcctgccagatcatcctgttcgaggatctgagcaactacaacccctacgaggaaaggtcccgcttcgagaacagcaagctcatgaagtggtccagacgcgagatccccagacaggttgcactgcagggcgagatctatggcctgcaagtgggagaagtgggcgctcagttcagcagcagattccacgccaagacaggcagccctggcatcagatgtagcgtcgtgaccaaagagaagctgcaggacaatcggttcttcaagaatctgcagagagagggcagactgaccctggacaaaatcgccgtgctgaaagagggcgatctgtacccagacaaaggcggcgagaagttcatcagcctgagcaaggatcggaagtgcgtgaccacacacgccgacatcaacgccgctcagaacctgcagaagcggttctggacaagaacccacggcttctacaaggtgtactgcaaggcctaccaggtggacggccagaccgtgtacatccctgagagcaaggaccagaagcagaagatcatcgaagagttcggcgagggctacttcattctgaaggacggggtgtacgaatgggtcaacgccggcaagctgaaaatcaagaagggcagctccaagcagagcagcagcgagctggtggatagcgacatcctgaaagacagcttcgacctggcctccgagctgaaaggcgaaaagctgatgctgtacagggaccccagcggcaatgtgttccccagcgacaaatggatggccgctggcgtgttcttcggaaagctggaacgcatcctgatcagcaagctgaccaaccagtactccatcagcaccatcgaggacgacagcagcaagcagtctatgaaaaggccggcggccacgaaaaaggccggccaggcaaaaaagaaaaagggatcctacccatacgatgttccagattacgcttatccctacgacgtgcctgattatgcatacccatatgatgtccccgactatgcctaa

SEQ ID NO: 3 - protein, 1361 aa, Artificial Sequence
  Description of artificial sequence: BhCas12b GGSGGS-ABE8-Xten20 at P153 polypeptide sequence
MAPKKKRKVGIHGVPAAATRSFILKIEPNEEVKKGLWKTHEVLNHGIAYYMNILKLIRQEAIYEHHEQDPKNPKKVSKAEIQAELWDFVLKMQKCNSFTHEVDKDEVFNILRELYEELVPSSVEKKGEANQLSNKFLYPLVDPNSQSGKGTASSGRKPRWYNLKIAGDPGGSGGSSEVEFSHEYWMRHALTLAKRARDEREVPVGAVLVLNNRVIGEGWNRAIGLHDPTAHAEIMALRQGGLVMQNYRLYDATLYVTFEPCVMCAGAMIHSRIGRVVFGVRNAKTGAAGSLMDVLHHPGMNHRVEITEGILADECAALLCRFFRMPRRVFNAQKKAQSSTDGSSGSETPGTSESATPESSGSWEEEKKKWEEDKKKDPLAKILGKLAEYGLIPLFIPYTDSNEPIVKEIKWMEKSRNQSVRRLDKDMFIQALERFLSWESWNLKVKEEYEKVEKEYKTLEERIKEDIQALKALEQYEKERQEQLLRDTLNTNEYRLSKRGLRGWREIIQKWLKMDENEPSEKYLEVFKDYQRKHPREAGDYSVYEFLSKKENHFIWRNHPEYPYLYATFCEIDKKKKDAKQQATFTLADPINHPLWVRFEERSGSNLNKYRILTEQLHTEKLKKKLTVQLDRLIYPTESGGWEEKGKVDIVLLPSRQFYNQIFLDIEEKGKHAFTYKDESIKFPLKGTLGGARVQFDRDHLRRYPHKVESGNVGRIYFNMTVNIEPTESPVSKSLKIHRDDFPKVVNFKPKELTEWIKDSKGKKLKSGIESLEIGLRVMSIDLGQRQAAAASIFEVVDQKPDIEGKLFFPIKGTELYAVHRASFNIKLPGETLVKSREVLRKAREDNLKLMNQKLNFLRNVLHFQQFEDITEREKRVTKWISRQENSDVPLVYQDELIQIRELMYKPYKDWVAFLKQLHKRLEVEIGKEVKHWRKSLSDGRKGLYGISLKNIDEIDRTRKFLLRWSLRPTEPGEVRRLEPGQRFAIDQLNHLNALKEDRLKKMANTIIMHALGYCYDVRKKKWQAKNPACQIILFEDLSNYNPYEERSRFENSKLMKWSRREIPRQVALQGEIYGLQVGEVGAQFSSRFHAKTGSPGIRCSVVTKEKLQDNRFFKNLQREGRLTLDKIAVLKEGDLYPDKGGEKFISLSKDRKCVTTHADINAAQNLQKRFWTRTHGFYKVYCKAYQVDGQTVYIPESKDQKQKIIEEFGEGYFILKDGVYEWVNAGKLKIKKGSSKQSSSELVDSDILKDSFDLASELKGEKLMLYRDPSGNVFPSDKWMAAGVFFGKLERILISKLTNQYSISTIEDDSSKQSMKRPAATKKAGQAKKKKGSYPYDVPDYAYPYDVPDYAYPYDVPDYA

SEQ ID NO: 4 - DNA, 4092 bp, Artificial Sequence
  Description of artificial sequence: BhCas12b GGSGGS-ABE8-Xten20 at K255 polynucleotide sequence
  misc_feature (1)..(6): Kozak sequence
  misc_feature (7)..(57): Sequence encoding N-terminal nuclear localization signal (NLS)
  misc_feature (58)..(822): Sequence encoding BhCas12b
  misc_feature (823)..(840): Sequence encoding a linker
  misc_feature (841)..(1338): Sequence encoding TadA*8
  misc_feature (1339)..(1398): Sequence encoding Xten20 linker
  misc_feature (1399)..(3954): Sequence encoding BhCas12b
  misc_feature (3955)..(4002): Sequence encoding C-terminal NLS
  misc_feature (4003)..(4008): Sequence encoding a GS linker
  misc_feature (4009)..(4089): Sequence encoding 3x hemagglutinin (HA) tag
gccaccatggccccaaagaagaagcggaaggtcggtatccacggagtcccagcagccgccaccagatccttcatcctgaagatcgagcccaacgaggaagtgaagaaaggcctctggaaaacccacgaggtgctgaaccacggaatcgcctactacatgaatatcctgaagctgatccggcaagaggccatctacgagcaccacgagcaggaccccaagaatcccaagaaggtgtccaaggccgagatccaggccgagctgtgggatttcgtgctgaagatgcagaagtgcaacagcttcacacacgaggtggacaaggacgaggtgttcaacatcctgagagagctgtacgaggaactggtgcccagcagcgtggaaaagaagggcgaagccaaccagctgagcaacaagtttctgtaccctctggtggaccccaacagccagtctggaaagggaacagccagcagcggcagaaagcccagatggtacaacctgaagattgccggcgatccctcctgggaagaagagaagaagaagtgggaagaagataagaaaaaggacccgctggccaagatcctgggcaagctggctgagtacggactgatccctctgttcatcccctacaccgacagcaacgagcccatcgtgaaagaaatcaagtggatggaaaagtcccggaaccagagcgtgcggcggctggataaggacatgttcattcaggccctggaacggttcctgagctgggagagctggaacctgaaagtgaaagaggaatacgagaaggtcgagaaagagtacaagaccctggaagagaggatcaaaggaggctctggaggaagctccgaagtcgagttttcccatgagtactggatgagacacgcattgactctcgcaaagagggctcgagatgaacgcgaggtgcccgtgggggcagtactcgtgctcaacaatcgcgtaatcggcgaaggttggaatagggcaatcggactccacgaccccactgcacatgcggaaatcatggcccttcgacagggagggcttgtgatgcagaattatcgactttatgatgcgacgctgtacgtcacgtttgaaccttgcgtaatgtgcgcgggagctatgattcactcccgcattggacgagttgtattcggtgttcgcaacgccaagacgggtgccgcaggttcactgatggacgtgctgcatcatccaggcatgaaccaccgggtagaaatcacagaaggcatattggcggacgaatgtgcggcgctgttgtgtcgtttttttcgcatgcccaggcgggtctttaacgcccagaaaaaagcacaatcctctactgacggctcttctggatctgaaacacctggcacaagcgagagcgccacccctgagagctctggcgaggacatccaggctctgaaggctctggaacagtatgagaaagagcggcaagaacagctgctgcgggacaccctgaacaccaacgagtaccggctgagcaagagaggccttagaggctggcgggaaatcatccagaaatggctgaaaatggacgagaacgagccctccgagaagtacctggaagtgttcaaggactaccagcggaagcaccctagagaggccggcgattacagcgtgtacgagttcctgtccaagaaagagaaccacttcatctggcggaatcaccctgagtacccctacctgtacgccaccttctgcgagatcgacaagaaaaagaaggacgccaagcagcaggccaccttcacactggccgatcctatcaatcaccctctgtgggtccgattcgaggaaagaagcggcagcaacctgaacaagtacagaatcctgaccgagcagctgcacaccgagaagctgaagaaaaagctgacagtgcagctggaccggctgatctaccctacagaatctggcggctgggaagagaagggcaaagtggacattgtgctgctgcccagccggcagttctacaaccagatcttcctggacatcgaggaaaagggcaagcacgccttcacctacaaggatgagagcatcaagttccctctgaagggcacactcggcggagccagagtgcagttcgacagagatcacctgagaagataccctcacaaggtggaaagcggcaacgtgggcagaatctacttcaacatgaccgtgaacatcgagcctacagagtccccagtgtccaagtctctgaagatccaccgggacgacttccccaaggtggtcaacttcaagcccaaagaactgaccgagtggatcaaggacagcaagggcaagaaactgaagtccggcatcgagtccctggaaatcggcctgagagtgatgagcatcgacctgggacagagacaggccgctgccgcctctattttcgaggtggtggatcagaagcccgacatcgaaggcaagctgtttttcccaatcaagggcaccgagctgtatgccgtgcacagagccagcttcaacatcaagctgcccggcgagacactggtcaagagcagagaagtgctgcggaaggccagagaggacaatctgaaactgatgaaccagaagctcaacttcctgcggaacgtgctgcacttccagcagttcgaggacatcaccgagagagagaagcgggtcaccaagtggatcagcagacaagagaacagcgacgtgcccctggtgtaccaggatgagctgatccagatccgcgagctgatgtacaagccttacaaggactgggtcgccttcctgaagcagctccacaagagactggaagtcgagatcggcaaagaagtgaagcactggcggaagtccctgagcgacggaagaaagggcctgtacggcatctccctgaagaacatcgacgagatcgatcggacccggaagttcctgctgagatggtccctgaggcctaccgaacctggcgaagtgcgtagactggaacccggccagagattcgccatcgaccagctgaatcacctgaacgccctgaaagaagatcggctgaagaagatggccaacaccatcatcatgcacgccctgggctactgctacgacgtgcggaagaagaaatggcaggctaagaaccccgcctgccagatcatcctgttcgaggatctgagcaactacaacccctacgaggaaaggtcccgcttcgagaacagcaagctcatgaagtggtccagacgcgagatccccagacaggttgcactgcagggcgagatctatggcctgcaagtgggagaagtgggcgctcagttcagcagcagattccacgccaagacaggcagccctggcatcagatgtagcgtcgtgaccaaagagaagctgcaggacaatcggttcttcaagaatctgcagagagagggcagactgaccctggacaaaatcgccgtgctgaaagagggcgatctgtacccagacaaaggcggcgagaagttcatcagcctgagcaaggatcggaagtgcgtgaccacacacgccgacatcaacgccgctcagaacctgcagaagcggttctggacaagaacccacggcttctacaaggtgtactgcaaggcctaccaggtggacggccagaccgtgtacatccctgagagcaaggaccagaagcagaagatcatcgaagagttcggcgagggctacttcattctgaaggacggggtgtacgaatgggtcaacgccggcaagctgaaaatcaagaagggcagctccaagcagagcagcagcgagctggtggatagcgacatcctgaaagacagcttcgacctggcctccgagctgaaaggcgaaaagctgatgctgtacagggaccccagcggcaatgtgttccccagcgacaaatggatggccgctggcgtgttcttcggaaagctggaacgcatcctgatcagcaagctgaccaaccagtactccatcagcaccatcgaggacgacagcagcaagcagtctatgaaaaggccggcggccacgaaaaaggccggccaggcaaaaaagaaaaagggatcctacccatacgatgttccagattacgcttatccctacgacgtgcctgattatgcatacccatatgatgtccccgactatgcctaa

SEQ ID NO: 5 - protein, 1361 aa, Artificial Sequence
  Description of artificial sequence: BhCas12b GGSGGS-ABE8-Xten20 at K255 polypeptide sequence
MAPKKKRKVGIHGVPAAATRSFILKIEPNEEVKKGLWKTHEVLNHGIAYYMNILKLIRQEAIYEHHEQDPKNPKKVSKAEIQAELWDFVLKMQKCNSFTHEVDKDEVFNILRELYEELVPSSVEKKGEANQLSNKFLYPLVDPNSQSGKGTASSGRKPRWYNLKIAGDPSWEEEKKKWEEDKKKDPLAKILGKLAEYGLIPLFIPYTDSNEPIVKEIKWMEKSRNQSVRRLDKDMFIQALERFLSWESWNLKVKEEYEKVEKEYKTLEERIKGGSGGSSEVEFSHEYWMRHALTLAKRARDEREVPVGAVLVLNNRVIGEGWNRAIGLHDPTAHAEIMALRQGGLVMQNYRLYDATLYVTFEPCVMCAGAMIHSRIGRVVFGVRNAKTGAAGSLMDVLHHPGMNHRVEITEGILADECAALLCRFFRMPRRVFNAQKKAQSSTDGSSGSETPGTSESATPESSGEDIQALKALEQYEKERQEQLLRDTLNTNEYRLSKRGLRGWREIIQKWLKMDENEPSEKYLEVFKDYQRKHPREAGDYSVYEFLSKKENHFIWRNHPEYPYLYATFCEIDKKKKDAKQQATFTLADPINHPLWVRFEERSGSNLNKYRILTEQLHTEKLKKKLTVQLDRLIYPTESGGWEEKGKVDIVLLPSRQFYNQIFLDIEEKGKHAFTYKDESIKFPLKGTLGGARVQFDRDHLRRYPHKVESGNVGRIYFNMTVNIEPTESPVSKSLKIHRDDFPKVVNFKPKELTEWIKDSKGKKLKSGIESLEIGLRVMSIDLGQRQAAAASIFEVVDQKPDIEGKLFFPIKGTELYAVHRASFNIKLPGETLVKSREVLRKAREDNLKLMNQKLNFLRNVLHFQQFEDITEREKRVTKWISRQENSDVPLVYQDELIQIRELMYKPYKDWVAFLKQLHKRLEVEIGKEVKHWRKSLSDGRKGLYGISLKNIDEIDRTRKFLLRWSLRPTEPGEVRRLEPGQRFAIDQLNHLNALKEDRLKKMANTIIMHALGYCYDVRKKKWQAKNPACQIILFEDLSNYNPYEERSRFENSKLMKWSRREIPRQVALQGEIYGLQVGEVGAQFSSRFHAKTGSPGIRCSVVTKEKLQDNRFFKNLQREGRLTLDKIAVLKEGDLYPDKGGEKFISLSKDRKCVTTHADINAAQNLQKRFWTRTHGFYKVYCKAYQVDGQTVYIPESKDQKQKIIEEFGEGYFILKDGVYEWVNAGKLKIKKGSSKQSSSELVDSDILKDSFDLASELKGEKLMLYRDPSGNVFPSDKWMAAGVFFGKLERILISKLTNQYSISTIEDDSSKQSMKRPAATKKAGQAKKKKGSYPYDVPDYAYPYDVPDYAYPYDVPDYA

SEQ ID NO: 6 - DNA, 4092 bp, Artificial Sequence
  Description of artificial sequence: BhCas12b GGSGGS-ABE8-Xten20 at D306 polynucleotide sequence
  misc_feature (1)..(6): Kozak sequence
  misc_feature (7)..(57): Sequence encoding N-terminal nuclear localization signal (NLS)
  misc_feature (58)..(975): Sequence encoding BhCas12b
  misc_feature (976)..(993): Sequence encoding a linker
  misc_feature (994)..(1491): Sequence encoding TadA*8
  misc_feature (1492)..(1551): Sequence encoding Xten20 linker
  misc_feature (1552)..(3954): Sequence encoding BhCas12b
  misc_feature (3955)..(4002): Sequence encoding C-terminal NLS
  misc_feature (4003)..(4008): Sequence encoding a GS linker
  misc_feature (4009)..(4089): Sequence encoding 3x hemagglutinin (HA) tag
gccaccatggccccaaagaagaagcggaaggtcggtatccacggagtcccagcagccgccaccagatccttcatcctgaagatcgagcccaacgaggaagtgaagaaaggcctctggaaaacccacgaggtgctgaaccacggaatcgcctactacatgaatatcctgaagctgatccggcaagaggccatctacgagcaccacgagcaggaccccaagaatcccaagaaggtgtccaaggccgagatccaggccgagctgtgggatttcgtgctgaagatgcagaagtgcaacagcttcacacacgaggtggacaaggacgaggtgttcaacatcctgagagagctgtacgaggaactggtgcccagcagcgtggaaaagaagggcgaagccaaccagctgagcaacaagtttctgtaccctctggtggaccccaacagccagtctggaaagggaacagccagcagcggcagaaagcccagatggtacaacctgaagattgccggcgatccctcctgggaagaagagaagaagaagtgggaagaagataagaaaaaggacccgctggccaagatcctgggcaagctggctgagtacggactgatccctctgttcatcccctacaccgacagcaacgagcccatcgtgaaagaaatcaagtggatggaaaagtcccggaaccagagcgtgcggcggctggataaggacatgttcattcaggccctggaacggttcctgagctgggagagctggaacctgaaagtgaaagaggaatacgagaaggtcgagaaagagtacaagaccctggaagagaggatcaaagaggacatccaggctctgaaggctctggaacagtatgagaaagagcggcaagaacagctgctgcgggacaccctgaacaccaacgagtaccggctgagcaagagaggccttagaggctggcgggaaatcatccagaaatggctgaaaatggacggaggctctggaggaagctccgaagtcgagttttcccatgagtactggatgagacacgcattgactctcgcaaagagggctcgagatgaacgcgaggtgcccgtgggggcagtactcgtgctcaacaatcgcgtaatcggcgaaggttggaatagggcaatcggactccacgaccccactgcacatgcggaaatcatggcccttcgacagggagggcttgtgatgcagaattatcgactttatgatgcgacgctgtacgtcacgtttgaaccttgcgtaatgtgcgcgggagctatgattcactcccgcattggacgagttgtattcggtgttcgcaacgccaagacgggtgccgcaggttcactgatggacgtgctgcatcatccaggcatgaaccaccgggtagaaatcacagaaggcatattggcggacgaatgtgcggcgctgttgtgtcgtttttttcgcatgcccaggcgggtctttaacgcccagaaaaaagcacaatcctctactgacggctcttctggatctgaaacacctggcacaagcgagagcgccacccctgagagctctggcgagaacgagccctccgagaagtacctggaagtgttcaaggactaccagcggaagcaccctagagaggccggcgattacagcgtgtacgagttcctgtccaagaaagagaaccacttcatctggcggaatcaccctgagtacccctacctgtacgccaccttctgcgagatcgacaagaaaaagaaggacgccaagcagcaggccaccttcacactggccgatcctatcaatcaccctctgtgggtccgattcgaggaaagaagcggcagcaacctgaacaagtacagaatcctgaccgagcagctgcacaccgagaagctgaagaaaaagctgacagtgcagctggaccggctgatctaccctacagaatctggcggctgggaagagaagggcaaagtggacattgtgctgctgcccagccggcagttctacaaccagatcttcctggacatcgaggaaaagggcaagcacgccttcacctacaaggatgagagcatcaagttccctctgaagggcacactcggcggagccagagtgcagttcgacagagatcacctgagaagataccctcacaaggtggaaagcggcaacgtgggcagaatctacttcaacatgaccgtgaacatcgagcctacagagtccccagtgtccaagtctctgaagatccaccgggacgacttccccaaggtggtcaacttcaagcccaaagaactgaccgagtggatcaaggacagcaagggcaagaaactgaagtccggcatcgagtccctggaaatcggcctgagagtgatgagcatcgacctgggacagagacaggccgctgccgcctctattttcgaggtggtggatcagaagcccgacatcgaaggcaagctgtttttcccaatcaagggcaccgagctgtatgccgtgcacagagccagcttcaacatcaagctgcccggcgagacactggtcaagagcagagaagtgctgcggaaggccagagaggacaatctgaaactgatgaaccagaagctcaacttcctgcggaacgtgctgcacttccagcagttcgaggacatcaccgagagagagaagcgggtcaccaagtggatcagcagacaagagaacagcgacgtgcccctggtgtaccaggatgagctgatccagatccgcgagctgatgtacaagccttacaaggactgggtcgccttcctgaagcagctccacaagagactggaagtcgagatcggcaaagaagtgaagcactggcggaagtccctgagcgacggaagaaagggcctgtacggcatctccctgaagaacatcgacgagatcgatcggacccggaagttcctgctgagatggtccctgaggcctaccgaacctggcgaagtgcgtagactggaacccggccagagattcgccatcgaccagctgaatcacctgaacgccctgaaagaagatcggctgaagaagatggccaacaccatcatcatgcacgccctgggctactgctacgacgtgcggaagaagaaatggcaggctaagaaccccgcctgccagatcatcctgttcgaggatctgagcaactacaacccctacgaggaaaggtcccgcttcgagaacagcaagctcatgaagtggtccagacgcgagatccccagacaggttgcactgcagggcgagatctatggcctgcaagtgggagaagtgggcgctcagttcagcagcagattccacgccaagacaggcagccctggcatcagatgtagcgtcgtgaccaaagagaagctgcaggacaatcggttcttcaagaatctgcagagagagggcagactgaccctggacaaaatcgccgtgctgaaagagggcgatctgtacccagacaaaggcggcgagaagttcatcagcctgagcaaggatcggaagtgcgtgaccacacacgccgacatcaacgccgctcagaacctgcagaagcggttctggacaagaacccacggcttctacaaggtgtactgcaaggcctaccaggtggacggccagaccgtgtacatccctgagagcaaggaccagaagcagaagatcatcgaagagttcggcgagggctacttcattctgaaggacggggtgtacgaatgggtcaacgccggcaagctgaaaatcaagaagggcagctccaagcagagcagcagcgagctggtggatagcgacatcctgaaagacagcttcgacctggcctccgagctgaaaggcgaaaagctgatgctgtacagggaccccagcggcaatgtgttccccagcgacaaatggatggccgctggcgtgttcttcggaaagctggaacgcatcctgatcagcaagctgaccaaccagtactccatcagcaccatcgaggacgacagcagcaagcagtctatgaaaaggccggcggccacgaaaaaggccggccaggcaaaaaagaaaaagggatcctacccatacgatgttccagattacgcttatccctacgacgtgcctgattatgcatacccatatgatgtccccgactatgcctaa

SEQ ID NO: 7 - protein, 1361 aa, Artificial Sequence
  Description of artificial sequence: BhCas12b GGSGGS-ABE8-Xten20 at D306 polypeptide sequence
MAPKKKRKVGIHGVPAAATRSFILKIEPNEEVKKGLWKTHEVLNHGIAYYMNILKLIRQEAIYEHHEQDPKNPKKVSKAEIQAELWDFVLKMQKCNSFTHEVDKDEVFNILRELYEELVPSSVEKKGEANQLSNKFLYPLVDPNSQSGKGTASSGRKPRWYNLKIAGDPSWEEEKKKWEEDKKKDPLAKILGKLAEYGLIPLFIPYTDSNEPIVKEIKWMEKSRNQSVRRLDKDMFIQALERFLSWESWNLKVKEEYEKVEKEYKTLEERIKEDIQALKALEQYEKERQEQLLRDTLNTNEYRLSKRGLRGWREIIQKWLKMDGGSGGSSEVEFSHEYWMRHALTLAKRARDEREVPVGAVLVLNNRVIGEGWNRAIGLHDPTAHAEIMALRQGGLVMQNYRLYDATLYVTFEPCVMCAGAMIHSRIGRVVFGVRNAKTGAAGSLMDVLHHPGMNHRVEITEGILADECAALLCRFFRMPRRVFNAQKKAQSSTDGSSGSETPGTSESATPESSGENEPSEKYLEVFKDYQRKHPREAGDYSVYEFLSKKENHFIWRNHPEYPYLYATFCEIDKKKKDAKQQATFTLADPINHPLWVRFEERSGSNLNKYRILTEQLHTEKLKKKLTVQLDRLIYPTESGGWEEKGKVDIVLLPSRQFYNQIFLDIEEKGKHAFTYKDESIKFPLKGTLGGARVQFDRDHLRRYPHKVESGNVGRIYFNMTVNIEPTESPVSKSLKIHRDDFPKVVNFKPKELTEWIKDSKGKKLKSGIESLEIGLRVMSIDLGQRQAAAASIFEVVDQKPDIEGKLFFPIKGTELYAVHRASFNIKLPGETLVKSREVLRKAREDNLKLMNQKLNFLRNVLHFQQFEDITEREKRVTKWISRQENSDVPLVYQDELIQIRELMYKPYKDWVAFLKQLHKRLEVEIGKEVKHWRKSLSDGRKGLYGISLKNIDEIDRTRKFLLRWSLRPTEPGEVRRLEPGQRFAIDQLNHLNALKEDRLKKMANTIIMHALGYCYDVRKKKWQAKNPACQIILFEDLSNYNPYEERSRFENSKLMKWSRREIPRQVALQGEIYGLQVGEVGAQFSSRFHAKTGSPGIRCSVVTKEKLQDNRFFKNLQREGRLTLDKIAVLKEGDLYPDKGGEKFISLSKDRKCVTTHADINAAQNLQKRFWTRTHGFYKVYCKAYQVDGQTVYIPESKDQKQKIIEEFGEGYFILKDGVYEWVNAGKLKIKKGSSKQSSSELVDSDILKDSFDLASELKGEKLMLYRDPSGNVFPSDKWMAAGVFFGKLERILISKLTNQYSISTIEDDSSKQSMKRPAATKKAGQAKKKKGSYPYDVPDYAYPYDVPDYAYPYDVPDYA

SEQ ID NO: 8 - DNA, 4092 bp, Artificial Sequence
  Description of artificial sequence: BhCas12b GGSGGS-ABE8-Xten20 at D980 polynucleotide sequence
  misc_feature (1)..(6): Kozak sequence
  misc_feature (7)..(57): Sequence encoding N-terminal nuclear localization signal (NLS)
  misc_feature (58)..(2997): Sequence encoding BhCas12b
  misc_feature (2998)..(3015): Sequence encoding a linker
  misc_feature (3016)..(3513): Sequence encoding TadA*8
  misc_feature (3514)..(3573): Sequence encoding Xten20 linker
  misc_feature (3574)..(3954): Sequence encoding BhCas12b
  misc_feature (3955)..(4002): Sequence encoding C-terminal NLS
  misc_feature (4003)..(4008): Sequence encoding a GS linker
  misc_feature (4009)..(4089): Sequence encoding 3x hemagglutinin (HA) tag
gccaccatggccccaaagaagaagcggaaggtcggtatccacggagtcccagcagccgccaccagatccttcatcctgaagatcgagcccaacgaggaagtgaagaaaggcctctggaaaacccacgaggtgctgaaccacggaatcgcctactacatgaatatcctgaagctgatccggcaagaggccatctacgagcaccacgagcaggaccccaagaatcccaagaaggtgtccaaggccgagatccaggccgagctgtgggatttcgtgctgaagatgcagaagtgcaacagcttcacacacgaggtggacaaggacgaggtgttcaacatcctgagagagctgtacgaggaactggtgcccagcagcgtggaaaagaagggcgaagccaaccagctgagcaacaagtttctgtaccctctggtggaccccaacagccagtctggaaagggaacagccagcagcggcagaaagcccagatggtacaacctgaagattgccggcgatccctcctgggaagaagagaagaagaagtgggaagaagataagaaaaaggacccgctggccaagatcctgggcaagctggctgagtacggactgatccctctgttcatcccctacaccgacagcaacgagcccatcgtgaaagaaatcaagtggatggaaaagtcccggaaccagagcgtgcggcggctggataaggacatgttcattcaggccctggaacggttcctgagctgggagagctggaacctgaaagtgaaagaggaatacgagaaggtcgagaaagagtacaagaccctggaagagaggatcaaagaggacatccaggctctgaaggctctggaacagtatgagaaagagcggcaagaacagctgctgcgggacaccctgaacaccaacgagtaccggctgagcaagagaggccttagaggctggcgggaaatcatccagaaatggctgaaaatggacgagaacgagccctccgagaagtacctggaagtgttcaaggactaccagcggaagcaccctagagaggccggcgattacagcgtgtacgagttcctgtccaagaaagagaaccacttcatctggcggaatcaccctgagtacccctacctgtacgccaccttctgcgagatcgacaagaaaaagaaggacgccaagcagcaggccaccttcacactggccgatcctatcaatcaccctctgtgggtccgattcgaggaaagaagcggcagcaacctgaacaagtacagaatcctgaccgagcagctgcacaccgagaagctgaagaaaaagctgacagtgcagctggaccggctgatctaccctacagaatctggcggctgggaagagaagggcaaagtggacattgtgctgctgcccagccggcagttctacaaccagatcttcctggacatcgaggaaaagggcaagcacgccttcacctacaaggatgagagcatcaagttccctctgaagggcacactcggcggagccagagtgcagttcgacagagatcacctgagaagataccctcacaaggtggaaagcggcaacgtgggcagaatctacttcaacatgaccgtgaacatcgagcctacagagtccccagtgtccaagtctctgaagatccaccgggacgacttccccaaggtggtcaacttcaagcccaaagaactgaccgagtggatcaaggacagcaagggcaagaaactgaagtccggcatcgagtccctggaaatcggcctgagagtgatgagcatcgacctgggacagagacaggccgctgccgcctctattttcgaggtggtggatcagaagcccgacatcgaaggcaagctgtttttcccaatcaagggcaccgagctgtatgccgtgcacagagccagcttcaacatcaagctgcccggcgagacactggtcaagagcagagaagtgctgcggaaggccagagaggacaatctgaaactgatgaaccagaagctcaacttcctgcggaacgtgctgcacttccagcagttcgaggacatcaccgagagagagaagcgggtcaccaagtggatcagcagacaagagaacagcgacgtgcccctggtgtaccaggatgagctgatccagatccgcgagctgatgtacaagccttacaaggactgggtcgccttcctgaagcagctccacaagagactggaagtcgagatcggcaaagaagtgaagcactggcggaagtccctgagcgacggaagaaagggcctgtacggcatctccctgaagaacatcgacgagatcgatcggacccggaagttcctgctgagatggtccctgaggcctaccgaacctggcgaagtgcgtagactggaacccggccagagattcgccatcgaccagctgaatcacctgaacgccctgaaagaagatcggctgaagaagatggccaacaccatcatcatgcacgccctgggctactgctacgacgtgcggaagaagaaatggcaggctaagaaccccgcctgccagatcatcctgttcgaggatctgagcaactacaacccctacgaggaaaggtcccgcttcgagaacagcaagctcatgaagtggtccagacgcgagatccccagacaggttgcactgcagggcgagatctatggcctgcaagtgggagaagtgggcgctcagttcagcagcagattccacgccaagacaggcagccctggcatcagatgtagcgtcgtgaccaaagagaagctgcaggacaatcggttcttcaagaatctgcagagagagggcagactgaccctggacaaaatcgccgtgctgaaagagggcgatctgtacccagacaaaggcggcgagaagttcatcagcctgagcaaggatcggaagtgcgtgaccacacacgccgacatcaacgccgctcagaacctgcagaagcggttctggacaagaacccacggcttctacaaggtgtactgcaaggcctaccaggtggacggaggctctggaggaagctccgaagtcgagttttcccatgagtactggatgagacacgcattgactctcgcaaagagggctcgagatgaacgcgaggtgcccgtgggggcagtactcgtgctcaacaatcgcgtaatcggcgaaggttggaatagggcaatcggactccacgaccccactgcacatgcggaaatcatggcccttcgacagggagggcttgtgatgcagaattatcgactttatgatgcgacgctgtacgtcacgtttgaaccttgcgtaatgtgcgcgggagctatgattcactcccgcattggacgagttgtattcggtgttcgcaacgccaagacgggtgccgcaggttcactgatggacgtgctgcatcatccaggcatgaaccaccgggtagaaatcacagaaggcatattggcggacgaatgtgcggcgctgttgtgtcgtttttttcgcatgcccaggcgggtctttaacgcccagaaaaaagcacaatcctctactgacggctcttctggatctgaaacacctggcacaagcgagagcgccacccctgagagctctggcggccagaccgtgtacatccctgagagcaaggaccagaagcagaagatcatcgaagagttcggcgagggctacttcattctgaaggacggggtgtacgaatgggtcaacgccggcaagctgaaaatcaagaagggcagctccaagcagagcagcagcgagctggtggatagcgacatcctgaaagacagcttcgacctggcctccgagctgaaaggcgaaaagctgatgctgtacagggaccccagcggcaatgtgttccccagcgacaaatggatggccgctggcgtgttcttcggaaagctggaacgcatcctgatcagcaagctgaccaaccagtactccatcagcaccatcgaggacgacagcagcaagcagtctatgaaaaggccggcggccacgaaaaaggccggccaggcaaaaaagaaaaagggatcctacccatacgatgttccagattacgcttatccctacgacgtgcctgattatgcatacccatatgatgtccccgactatgcctaa

SEQ ID NO: 9 - protein, 1361 aa, Artificial Sequence
  Description of artificial sequence: BhCas12b GGSGGS-ABE8-Xten20 at D980 polypeptide sequence
MAPKKKRKVGIHGVPAAATRSFILKIEPNEEVKKGLWKTHEVLNHGIAYYMNILKLIRQEAIYEHHEQDPKNPKKVSKAEIQAELWDFVLKMQKCNSFTHEVDKDEVFNILRELYEELVPSSVEKKGEANQLSNKFLYPLVDPNSQSGKGTASSGRKPRWYNLKIAGDPSWEEEKKKWEEDKKKDPLAKILGKLAEYGLIPLFIPYTDSNEPIVKEIKWMEKSRNQSVRRLDKDMFIQALERFLSWESWNLKVKEEYEKVEKEYKTLEERIKEDIQALKALEQYEKERQEQLLRDTLNTNEYRLSKRGLRGWREIIQKWLKMDENEPSEKYLEVFKDYQRKHPREAGDYSVYEFLSKKENHFIWRNHPEYPYLYATFCEIDKKKKDAKQQATFTLADPINHPLWVRFEERSGSNLNKYRILTEQLHTEKLKKKLTVQLDRLIYPTESGGWEEKGKVDIVLLPSRQFYNQIFLDIEEKGKHAFTYKDESIKFPLKGTLGGARVQFDRDHLRRYPHKVESGNVGRIYFNMTVNIEPTESPVSKSLKIHRDDFPKVVNFKPKELTEWIKDSKGKKLKSGIESLEIGLRVMSIDLGQRQAAAASIFEVVDQKPDIEGKLFFPIKGTELYAVHRASFNIKLPGETLVKSREVLRKAREDNLKLMNQKLNFLRNVLHFQQFEDITEREKRVTKWISRQENSDVPLVYQDELIQIRELMYKPYKDWVAFLKQLHKRLEVEIGKEVKHWRKSLSDGRKGLYGISLKNIDEIDRTRKFLLRWSLRPTEPGEVRRLEPGQRFAIDQLNHLNALKEDRLKKMANTIIMHALGYCYDVRKKKWQAKNPACQIILFEDLSNYNPYEERSRFENSKLMKWSRREIPRQVALQGEIYGLQVGEVGAQFSSRFHAKTGSPGIRCSVVTKEKLQDNRFFKNLQREGRLTLDKIAVLKEGDLYPDKGGEKFISLSKDRKCVTTHADINAAQNLQKRFWTRTHGFYKVYCKAYQVDGGSGGSSEVEFSHEYWMRHALTLAKRARDEREVPVGAVLVLNNRVIGEGWNRAIGLHDPTAHAEIMALRQGGLVMQNYRLYDATLYVTFEPCVMCAGAMIHSRIGRVVFGVRNAKTGAAGSLMDVLHHPGMNHRVEITEGILADECAALLCRFFRMPRRVFNAQKKAQSSTDGSSGSETPGTSESATPESSGGQTVYIPESKDQKQKIIEEFGEGYFILKDGVYEWVNAGKLKIKKGSSKQSSSELVDSDILKDSFDLASELKGEKLMLYRDPSGNVFPSDKWMAAGVFFGKLERILISKLTNQYSISTIEDDSSKQSMKRPAATKKAGQAKKKKGSYPYDVPDYAYPYDVPDYAYPYDVPDYA

SEQ ID NO: 10 - DNA, 4092 bp, Artificial Sequence
  Description of artificial sequence: BhCas12b GGSGGS-ABE8-Xten20 at K1019 polynucleotide sequence
  misc_feature (1)..(6): Kozak sequence
  misc_feature (7)..(57): Sequence encoding N-terminal nuclear localization signal (NLS)
  misc_feature (58)..(3114): Sequence encoding BhCas12b
  misc_feature (3115)..(3132): Sequence encoding a linker
  misc_feature (3133)..(3630): Sequence encoding TadA*8
  misc_feature (3631)..(3690): Sequence encoding Xten20 linker
  misc_feature (3691)..(3954): Sequence encoding BhCas12b
  misc_feature (3955)..(4002): Sequence encoding C-terminal NLS
  misc_feature (4003)..(4008): Sequence encoding GS linker
  misc_feature (4009)..(4089): Sequence encoding 3x hemagglutinin (HA) tag
gccaccatggccccaaagaagaagcggaaggtcggtatccacggagtcccagcagccgccaccagatccttcatcctgaagatcgagcccaacgaggaagtgaagaaaggcctctggaaaacccacgaggtgctgaaccacggaatcgcctactacatgaatatcctgaagctgatccggcaagaggccatctacgagcaccacgagcaggaccccaagaatcccaagaaggtgtccaaggccgagatccaggccgagctgtgggatttcgtgctgaagatgcagaagtgcaacagcttcacacacgaggtggacaaggacgaggtgttcaacatcctgagagagctgtacgaggaactggtgcccagcagcgtggaaaagaagggcgaagccaaccagctgagcaacaagtttctgtaccctctggtggaccccaacagccagtctggaaagggaacagccagcagcggcagaaagcccagatggtacaacctgaagattgccggcgatccctcctgggaagaagagaagaagaagtgggaagaagataagaaaaaggacccgctggccaagatcctgggcaagctggctgagtacggactgatccctctgttcatcccctacaccgacagcaacgagcccatcgtgaaagaaatcaagtggatggaaaagtcccggaaccagagcgtgcggcggctggataaggacatgttcattcaggccctggaacggttcctgagctgggagagctggaacctgaaagtgaaagaggaatacgagaaggtcgagaaagagtacaagaccctggaagagaggatcaaagaggacatccaggctctgaaggctctggaacagtatgagaaagagcggcaagaacagctgctgcgggacaccctgaacaccaacgagtaccggctgagcaagagaggccttagaggctggcgggaaatcatccagaaatggctgaaaatggacgagaacgagccctccgagaagtacctggaagtgttcaaggactaccagcggaagcaccctagagaggccggcgattacagcgtgtacgagttcctgtccaagaaagagaaccacttcatctggcggaatcaccctgagtacccctacctgtacgccaccttctgcgagatcgacaagaaaaagaaggacgccaagcagcaggccaccttcacactggccgatcctatcaatcaccctctgtgggtccgattcgaggaaagaagcggcagcaacctgaacaagtacagaatcctgaccgagcagctgcacaccgagaagctgaagaaaaagctgacagtgcagctggaccggctgatctaccctacagaatctggcggctgggaagagaagggcaaagtggacattgtgctgctgcccagccggcagttctacaaccagatcttcctggacatcgaggaaaagggcaagcacgccttcacctacaaggatgagagcatcaagttccctctgaagggcacactcggcggagccagagtgcagttcgacagagatcacctgagaagataccctcacaaggtggaaagcggcaacgtgggcagaatctacttcaacatgaccgtgaacatcgagcctacagagtccccagtgtccaagtctctgaagatccaccgggacgacttccccaaggtggtcaacttcaagcccaaagaactgaccgagtggatcaaggacagcaagggcaagaaactgaagtccggcatcgagtccctggaaatcggcctgagagtgatgagcatcgacctgggacagagacaggccgctgccgcctctattttcgaggtggtggatcagaagcccgacatcgaaggcaagctgtttttcccaatcaagggcaccgagctgtatgccgtgcacagagccagcttcaacatcaagctgcccggcgagacactggtcaagagcagagaagtgctgcggaaggccagagaggacaatctgaaactgatgaaccagaagctcaacttcctgcggaacgtgctgcacttccagcagttcgaggacatcaccgagagagagaagcgggtcaccaagtggatcagcagacaagagaacagcgacgtgcccctggtgtaccaggatgagctgatccagatccgcgagctgatgtacaagccttacaaggactgggtcgccttcctgaagcagctccacaagagactggaagtcgagatcggcaaagaagtgaagcactggcggaagtccctgagcgacggaagaaagggcctgtacggcatctccctgaagaacatcgacgagatcgatcggacccggaagttcctgctgagatggtccctgaggcctaccgaacctggcgaagtgcgtagactggaacccggccagagattcgccatcgaccagctgaatcacctgaacgccctgaaagaagatcggctgaagaagatggccaacaccatcatcatgcacgccctgggctactgctacgacgtgcggaagaagaaatggcaggctaagaaccccgcctgccagatcatcctgttcgaggatctgagcaactacaacccctacgaggaaaggtcccgcttcgagaacagcaagctcatgaagtggtccagacgcgagatccccagacaggttgcactgcagggcgagatctatggcctgcaagtgggagaagtgggcgctcagttcagcagcagattccacgccaagacaggcagccctggcatcagatgtagcgtcgtgaccaaagagaagctgcaggacaatcggttcttcaagaatctgcagagagagggcagactgaccctggacaaaatcgccgtgctgaaagagggcgatctgtacccagacaaaggcggcgagaagttcatcagcctgagcaaggatcggaagtgcgtgaccacacacgccgacatcaacgccgctcagaacctgcagaagcggttctggacaagaacccacggcttctacaaggtgtactgcaaggcctaccaggtggacggccagaccgtgtacatccctgagagcaaggaccagaagcagaagatcatcgaagagttcggcgagggctacttcattctgaaggacggggtgtacgaatgggtcaacgccggcaagggaggctctggaggaagctccgaagtcgagttttcccatgagtactggatgagacacgcattgactctcgcaaagagggctcgagatgaacgcgaggtgcccgtgggggcagtactcgtgctcaacaatcgcgtaatcggcgaaggttggaatagggcaatcggactccacgaccccactgcacatgcggaaatcatggcccttcgacagggagggcttgtgatgcagaattatcgactttatgatgcgacgctgtacgtcacgtttgaaccttgcgtaatgtgcgcgggagctatgattcactcccgcattggacgagttgtattcggtgttcgcaacgccaagacgggtgccgcaggttcactgatggacgtgctgcatcatccaggcatgaaccaccgggtagaaatcacagaaggcatattggcggacgaatgtgcggcgctgttgtgtcgtttttttcgcatgcccaggcgggtctttaacgcccagaaaaaagcacaatcctctactgacggctcttctggatctgaaacacctggcacaagcgagagcgccacccctgagagctctggcctgaaaatcaagaagggcagctccaagcagagcagcagcgagctggtggatagcgacatcctgaaagacagcttcgacctggcctccgagctgaaaggcgaaaagctgatgctgtacagggaccccagcggcaatgtgttccccagcgacaaatggatggccgctggcgtgttcttcggaaagctggaacgcatcctgatcagcaagctgaccaaccagtactccatcagcaccatcgaggacgacagcagcaagcagtctatgaaaaggccggcggccacgaaaaaggccggccaggcaaaaaagaaaaagggatcctacccatacgatgttccagattacgcttatccctacgacgtgcctgattatgcatacccatatgatgtccccgactatgcctaa

SEQ ID NO: 11 - protein, 1361 aa, Artificial Sequence
  Description of artificial sequence: BhCas12b GGSGGS-ABE8-Xten20 at K1019 polypeptide sequence
MAPKKKRKVGIHGVPAAATRSFILKIEPNEEVKKGLWKTHEVLNHGIAYYMNILKLIRQEAIYEHHEQDPKNPKKVSKAEIQAELWDFVLKMQKCNSFTHEVDKDEVFNILRELYEELVPSSVEKKGEANQLSNKFLYPLVDPNSQSGKGTASSGRKPRWYNLKIAGDPSWEEEKKKWEEDKKKDPLAKILGKLAEYGLIPLFIPYTDSNEPIVKEIKWMEKSRNQSVRRLDKDMFIQALERFLSWESWNLKVKEEYEKVEKEYKTLEERIKEDIQALKALEQYEKERQEQLLRDTLNTNEYRLSKRGLRGWREIIQKWLKMDENEPSEKYLEVFKDYQRKHPREAGDYSVYEFLSKKENHFIWRNHPEYPYLYATFCEIDKKKKDAKQQATFTLADPINHPLWVRFEERSGSNLNKYRILTEQLHTEKLKKKLTVQLDRLIYPTESGGWEEKGKVDIVLLPSRQFYNQIFLDIEEKGKHAFTYKDESIKFPLKGTLGGARVQFDRDHLRRYPHKVESGNVGRIYFNMTVNIEPTESPVSKSLKIHRDDFPKVVNFKPKELTEWIKDSKGKKLKSGIESLEIGLRVMSIDLGQRQAAAASIFEVVDQKPDIEGKLFFPIKGTELYAVHRASFNIKLPGETLVKSREVLRKAREDNLKLMNQKLNFLRNVLHFQQFEDITEREKRVTKWISRQENSDVPLVYQDELIQIRELMYKPYKDWVAFLKQLHKRLEVEIGKEVKHWRKSLSDGRKGLYGISLKNIDEIDRTRKFLLRWSLRPTEPGEVRRLEPGQRFAIDQLNHLNALKEDRLKKMANTIIMHALGYCYDVRKKKWQAKNPACQIILFEDLSNYNPYEERSRFENSKLMKWSRREIPRQVALQGEIYGLQVGEVGAQFSSRFHAKTGSPGIRCSVVTKEKLQDNRFFKNLQREGRLTLDKIAVLKEGDLYPDKGGEKFISLSKDRKCVTTHADINAAQNLQKRFWTRTHGFYKVYCKAYQVDGQTVYIPESKDQKQKIIEEFGEGYFILKDGVYEWVNAGKGGSGGSSEVEFSHEYWMRHALTLAKRARDEREVPVGAVLVLNNRVIGEGWNRAIGLHDPTAHAEIMALRQGGLVMQNYRLYDATLYVTFEPCVMCAGAMIHSRIGRVVFGVRNAKTGAAGSLMDVLHHPGMNHRVEITEGILADECAALLCRFFRMPRRVFNAQKKAQSSTDGSSGSETPGTSESATPESSGLKIKKGSSKQSSSELVDSDILKDSFDLASELKGEKLMLYRDPSGNVFPSDKWMAAGVFFGKLERILISKLTNQYSISTIEDDSSKQSMKRPAATKKAGQAKKKKGSYPYDVPDYAYPYDVPDYAYPYDVPDYA

SEQ ID NO: 12 - protein, 208 aa, Petromyzon marinus
  MISC_FEATURE (1)..(208): tr|A5H718|A5H718_PETMA Cytosine deaminase OS=Petromyzon marinus OX=7757 PE=2 SV=1 amino acid sequence; PmCDA1 polypeptide sequence
MTDAEYVRIHEKLDIYTFKKQFFNNKKSVSHRCYVLFELKRRGERRACFWGYAVNKPQSGTERGIHAEIFSIRKVEEYLRDNPGQFTINWYSSWSPCADCAEKILEWYNQELRGNGHTLKIWACKLYYEKNARNQIGLWNLRDNGVGLNVMVSEHYQCCRKIFIQSSHNQLNENRWLEKTLKRAEKRRSELSIMIQVKILHTTKSPAV

SEQ ID NO: 13 - DNA, 766 bp, Petromyzon marinus
  misc_feature (1)..(766): EF094822.1 Petromyzon marinus isolate PmCDA.21 cytosine deaminase mRNA, complete cds; PmCDA1 polynucleotide sequence
tgacacgacacagccgtgtatatgaggaagggtagctggatggggggggggggaatacgttcagagaggacattagcgagcgtcttgttggtggccttgagtctagacacctgcagacatgaccgacgctgagtacgtgagaatccatgagaagttggacatctacacgtttaagaaacagtttttcaacaacaaaaaatccgtgtcgcatagatgctacgttctctttgaattaaaacgacggggtgaacgtagagcgtgtttttggggctatgctgtgaataaaccacagagcgggacagaacgtggaattcacgccgaaatctttagcattagaaaagtcgaagaatacctgcgcgacaaccccggacaattcacgataaattggtactcatcctggagtccttgtgcagattgcgctgaaaagatcttagaatggtataaccaggagctgcgggggaacggccacactttgaaaatctgggcttgcaaactctattacgagaaaaatgcgaggaatcaaattgggctgtggaacctcagagataacggggttgggttgaatgtaatggtaagtgaacactaccaatgttgcaggaaaatattcatccaatcgtcgcacaatcaattgaatgagaatagatggcttgagaagactttgaagcgagctgaaaaacgacggagcgagttgtccattatgattcaggtaaaaatactccacaccactaagagtcctgctgtttaagaggctatgcggatggttttc

SEQ ID NO: 14 - protein, 145 aa, Homo sapiens
  MISC_FEATURE (1)..(145): tr|Q6QJ80|Q6QJ80_HUMAN Activation-induced cytidine deaminase OS=Homo sapiens OX=9606 GN=AICDA PE=2 SV=1; AID polypeptide sequence
MDSLLMNRRKFLYQFKNVRWAKGRRETYLCYVVKRRDSATSFSLDFGYLRNKNGCHVELLFLRYISDWDLDPGRCYRVTWFTSWSPCYDCARHVADFLRGNPNLSLRIFTARLYFCEDRKAEPEGLRRLHRAGVQIAIMTFKAPV

SEQ ID NO: 15 - DNA, 10681 bp, Homo sapiens
  misc_feature (1)..(10681): NG_011588.1:5001-15681 Homo sapiens activation induced cytidine deaminase (AICDA), RefSeqGene (LRG_17) on chromosome 12; nucleic acid sequence of the CDS of human AID; polynucleotide sequence
agagaaccatcattaattgaagtgagatttttctggcctgagacttgcagggaggcaagaagacactctggacaccactatggacaggtaaagaggcagtcttctcgtgggtgattgcactggccttcctctcagagcaaatctgagtaatgagactggtagctatccctttctctcatgtaactgtctgactgataagatcagcttgatcaatatgcatatatattttttgatctgtctccttttcttctattcagatcttatacgctgtcagcccaattctttctgtttcagacttctcttgatttccctctttttcatgtggcaaaagaagtagtgcgtacaatgtactgattcgtcctgagatttgtaccatggttgaaactaatttatggtaataatattaacatagcaaatctttagagactcaaatcatgaaaaggtaatagcagtactgtactaaaaacggtagtgctaattttcgtaataattttgtaaatattcaacagtaaaacaacttgaagacacactttcctagggaggcgttactgaaataatttagctatagtaagaaaatttgtaattttagaaatgccaagcattctaaattaattgcttgaaagtcactatgattgtgtccattataaggagacaaattcattcaagcaagttatttaatgttaaaggcccaattgttaggcagttaatggcacttttactattaactaatctttccatttgttcagacgtagcttaacttacctcttaggtgtgaatttggttaaggtcctcataatgtctttatgtgcagtttttgataggttattgtcatagaacttattctattcctacatttatgattactatggatgtatgagaataacacctaatccttatactttacctcaatttaactcctttataaagaacttacattacagaataaagattttttaaaaatatatttttttgtagagacagggtcttagcccagccgaggctggtctctaagtcctggcccaagcgatcctcctgcctgggcctcctaaagtgctggaattatagacatgagccatcacatccaatatacagaataaagatttttaatggaggatttaatgttcttcagaaaattttcttgaggtcagacaatgtcaaatgtctcctcagtttacactgagattttgaaaacaagtctgagctataggtccttgtgaagggtccattggaaatacttgttcaaagtaaaatggaaagcaaaggtaaaatcagcagttgaaattcagagaaagacagaaaaggagaaaagatgaaattcaacaggacagaagggaaatatattatcattaaggaggacagtatctgtagagctcattagtgatggcaaaatgacttggtcaggattatttttaacccgcttgtttctggtttgcacggctggggatgcagctagggttctgcctcagggagcacagctgtccagagcagctgtcagcctgcaagcctgaaacactccctcggtaaagtccttcctactcaggacagaaatgacgagaacagggagctggaaacaggcccctaaccagagaagggaagtaatggatcaacaaagttaactagcaggtcaggatcacgcaattcatttcactctgactggtaacatgtgacagaaacagtgtaggcttattgtattttcatgtagagtaggacccaaaaatccacccaaagtcctttatctatgccacatccttcttatctatacttccaggacactttttcttccttatgataaggctctctctctctccacacacacacacacacacacacacacacacacacacacacacacaaacacacaccccgccaaccaaggtgcatgtaaaaagatgtagattcctctgcctttctcatctacacagcccaggagggtaagttaatataagagggatttattggtaagagatgatgcttaatctgtttaacactgggcctcaaagagagaatttcttttcttctgtacttattaagcacctattatgtgttgagcttatatatacaaagggttattatatgctaatatagtaatagtaatggtggttggtactatggtaattaccataaaaattattatccttttaaaataaagctaattattattggatcttttttagtattcattttatgttttttatgtttttgattttttaaaagacaatctcaccctgttacccaggctggagtgcagtggtgcaatcatagctttctgcagtcttgaactcctgggctcaagcaatcctcctgccttggcctcccaaagtgttgggatacagtcatgagccactgcatctggcctaggatccatttagattaaaatatgcattttaaattttaaaataatatggctaatttttaccttatgtaatgtgtatactggcaataaatctagtttgctgcctaaagtttaaagtgctttccagtaagcttcatgtacgtgaggggagacatttaaagtgaaacagacagccaggtgtggtggctcacgcctgtaatcccagcactctgggaggctgaggtgggtggatcgcttgagccctggagttcaagaccagcctgagcaacatggcaaaacgctgtttctataacaaaaattagccgggcatggtggcatgtgcctgtggtcccagctactagggggctgaggcaggagaatcgttggagcccaggaggtcaaggctgcactgagcagtgcttgcgccactgcactccagcctgggtgacaggaccagaccttgcctcaaaaaaataagaagaaaaattaaaaataaatggaaacaactacaaagagctgttgtcctagatgagctacttagttaggctgatattttggtatttaacttttaaagtcagggtctgtcacctgcactacattattaaaatatcaattctcaatgtatatccacacaaagactggtacgtgaatgttcatagtacctttattcacaaaaccccaaagtagagactatccaaatatccatcaacaagtgaacaaataaacaaaatgtgctatatccatgcaatggaataccaccctgcagtacaaagaagctacttggggatgaatcccaaagtcatgacgctaaatgaaagagtcagacatgaaggaggagataatgtatgccatacgaaattctagaaaatgaaagtaacttatagttacagaaagcaaatcagggcaggcatagaggctcacacctgtaatcccagcactttgagaggccacgtgggaagattgctagaactcaggagttcaagaccagcctgggcaacacagtgaaactccattctccacaaaaatgggaaaaaaagaaagcaaatcagtggttgtcctgtggggaggggaaggactgcaaagagggaagaagctctggtggggtgagggtggtgattcaggttctgtatcctgactgtggtagcagtttggggtgtttacatccaaaaatattcgtagaattatgcatcttaaatgggtggagtttactgtatgtaaattatacctcaatgtaagaaaaaataatgtgtaagaaaactttcaattctcttgccagcaaacgttattcaaattcctgagccctttacttcgcaaattctctgcacttctgccccgtaccattaggtgacagcactagctccacaaattggataaatgcatttctggaaaagactagggacaaaatccaggcatcacttgtgctttcatatcaaccatgctgtacagcttgtgttgctgtctgcagctgcaatggggactcttgatttctttaaggaaacttgggttaccagagtatttccacaaatgctattcaaattagtgcttatgatatgcaagacactgtgctaggagccagaaaacaaagaggaggagaaatcagtcattatgtgggaacaacatagcaagatatttagatcattttgactagttaaaaaagcagcagagtacaaaatcacacatgcaatcagtataatccaaatcatgtaaatatgtgcctgtagaaagactagaggaataaacacaagaatcttaacagtcattgtcattagacactaagtctaattattattattagacactatgatatttgagatttaaaaaatctttaatattttaaaatttagagctcttctatttttccatagtattcaagtttgacaatgatcaagtattactctttctttttttttttttttttttttttttgagatggagttttggtcttgttgcccatgctggagtggaatggcatgaccatagctcactgcaacctccacctcctgggttcaagcaaagctgtcgcctcagcctcccgggtagatgggattacaggcgcccaccaccacactcggctaatgtttgtatttttagtagagatggggtttcaccatgttggccaggctggtctcaaactcctgacctcagaggatccacctgcctcagcctcccaaagtgctgggattacagatgtaggccactgcgcccggccaagtattgctcttatacattaaaaaacaggtgtgagccactgcgcccagccaggtattgctcttatacattaaaaaataggccggtgcagtggctcacgcctgtaatcccagcactttgggaagccaaggcgggcagaacacccgaggtcaggagtccaaggccagcctggccaagatggtgaaaccccgtctctattaaaaatacaaacattacctgggcatgatggtgggcgcctgtaatcccagctactcaggaggctgaggcaggaggatccgcggagcctggcagatctgcctgagcctgggaggttgaggctacagtaagccaagatcatgccagtatacttcagcctgggcgacaaagtgagaccgtaacaaaaaaaaaaaaatttaaaaaaagaaatttagatcaagatccaactgtaaaaagtggcctaaacaccacattaaagagtttggagtttattctgcaggcagaagagaaccatcagggggtcttcagcatgggaatggcatggtgcacctggtttttgtgagatcatggtggtgacagtgtggggaatgttattttggagggactggaggcagacagaccggttaaaaggccagcacaacagataaggaggaagaagatgagggcttggaccgaagcagagaagagcaaacagggaaggtacaaattcaagaaatattggggggtttgaatcaacacatttagatgattaattaaatatgaggactgaggaataagaaatgagtcaaggatggttccaggctgctaggctgcttacctgaggtggcaaagtcgggaggagtggcagtttaggacagggggcagttgaggaatattgttttgatcattttgagtttgaggtacaagttggacacttaggtaaagactggaggggaaatctgaatatacaattatgggactgaggaacaagtttattttattttttgtttcgttttcttgttgaagaacaaatttaattgtaatcccaagtcatcagcatctagaagacagtggcaggaggtgactgtcttgtgggtaagggtttggggtccttgatgagtatctctcaattggccttaaatataagcaggaaaaggagtttatgatggattccaggctcagcagggctcaggagggctcaggcagccagcagaggaagtcagagcatcttctttggtttagcccaagtaatgacttccttaaaaagctgaaggaaaatccagagtgaccagattataaactgtactcttgcattttctctccctcctctcacccacagcctcttgatgaaccggaggaagtttctttaccaattcaaaaatgtccgctgggctaagggtcggcgtgagacctacctgtgctacgtagtgaagaggcgtgacagtgctacatccttttcactggactttggttatcttcgcaataaggtatcaattaaagtcggctttgcaagcagtttaatggtcaactgtgagtgcttttagagccacctgctgatggtattacttccatccttttttggcatttgtgtctctatcacattcctcaaatccttttttttatttctttttccatgtccatgcacccatattagacatggcccaaaatatgtgatttaattcctccccagtaatgctgggcaccctaataccactccttccttcagtgccaagaacaactgctcccaaactgtttaccagctttcctcagcatctgaattgcctttgagattaattaagctaaaagcatttttatatgggagaatattatcagcttgtccaagcaaaaattttaaatgtgaaaaacaaattgtgtcttaagcatttttgaaaattaaggaagaagaatttgggaaaaaattaacggtggctcaattctgtcttccaaatgatttcttttccctcctactcacatgggtcgtaggccagtgaatacattcaacatggtgatccccagaaaactcagagaagcctcggctgatgattaattaaattgatctttcggctacccgagagaattacatttccaagagacttcttcaccaaaatccagatgggtttacataaacttctgcccacgggtatctcctctctcctaacacgctgtgacgtctgggcttggtggaatctcagggaagcatccgtggggtggaaggtcatcgtctggctcgttgtttgatggttatattaccatgcaattttctttgcctacatttgtattgaatacatcccaatctccttcctattcggtgacatgacacattctatttcagaaggctttgattttatcaagcactttcatttacttctcatggcagtgcctattacttctcttacaatacccatctgtctgctttaccaaaatctatttccccttttcagatcctcccaaatggtcctcataaactgtcctgcctccacctagtggtccaggtatatttccacaatgttacatcaacaggcacttctagccattttccttctcaaaaggtgcaaaaagcaacttcataaacacaaattaaatcttcggtgaggtagtgtgatgctgcttcctcccaactcagcgcacttcgtcttcctcattccacaaaaacccatagccttccttcactctgcaggactagtgctgccaagggttcagctctacctactggtgtgctcttttgagcaagttgcttagcctctctgtaacacaaggacaatagctgcaagcatccccaaagatcattgcaggagacaatgactaaggctaccagagccgcaataaaagtcagtgaattttagcgtggtcctctctgtctctccagaacggctgccacgtggaattgctcttcctccgctacatctcggactgggacctagaccctggccgctgctaccgcgtcacctggttcacctcctggagcccctgctacgactgtgcccgacatgtggccgactttctgcgagggaaccccaacctcagtctgaggatcttcaccgcgcgcctctacttctgtgaggaccgcaaggctgagcccgaggggctgcggcggctgcaccgcgccggggtgcaaatagccatcatgaccttcaaaggtgcgaaagggccttccgcgcaggcgcagtgcagcagcccgcattcgggattgcgatgcggaatgaatgagttagtggggaagctcgaggggaagaagtgggcggggattctggttcacctctggagccgaaattaaagattagaagcagagaaaagagtgaatggctcagagacaaggccccgaggaaatgagaaaatggggccagggttgcttctttcccctcgatttggaacctgaactgtcttctacccccatatccccgcctttttttcctttttttttttttgaagattatttttactgctggaatacttttgtagaaaaccacgaaagaactttcaaagcctgggaagggctgcatgaaaattcagttcgtctctccagacagcttcggcgcatccttttggtaaggggcttcctcgctttttaaattttctttctttctctacagtcttttttggagtttcgtatatttcttatattttcttattgttcaatcactctcagttttcatctgatgaaaactttatttctcctccacatcagctttttcttctgctgtttcaccattcagagccctctgctaaggttccttttccctcccttttctttcttttgttgtttcacatctttaaatttctgtctctccccagggttgcgtttccttcctggtcagaattcttttctcctttttttttttttttttttttttttttaaacaaacaaacaaaaaacccaaaaaaactctttcccaatttactttcttccaacatgttacaaagccatccactcagtttagaagactctccggccccaccgacccccaacctcgttttgaagccattcactcaatttgcttctctctttctctacagcccctgtatgaggttgatgacttacgagacgcatttcgtactttgggactttgatagcaacttccaggaatgtcacacacgatgaaatatctctgctgaagacagtggataaaaaacagtccttcaagtcttctctgtttttattcttcaactctcactttcttagagtttacagaaaaaatatttatatacgactctttaaaaagatctatgtcttgaaaatagagaaggaacacaggtctggccagggacgtgctgcaattggtgcagttttgaatgcaacattgtcccctactgggaataacagaactgcaggacctgggagcatcctaaagtgtcaacgtttttctatgacttttaggtaggatgagagcagaaggtagatcctaaaaagcatggtgagaggatcaaatgtttttatatcaacatcctttattatttgattcatttgagttaacagtggtgttagtgatagatttttctattcttttcccttgacgtttactttcaagtaacacaaactcttccatcaggccatgatctataggacctcctaatgagagtatctgggtgattgtgaccccaaaccatctctccaaagcattaatatccaatcatgcgctgtatgttttaatcagcagaagcatgtttttatgtttgtacaaaagaagattgttatgggtggggatggaggtatagaccatgcatggtcaccttcaagctactttaataaaggatcttaaaatgggcaggaggactgtgaacaagacaccctaataatgggttgatgtctgaagtagcaaatcttctggaaacgcaaactcttttaaggaagtccctaatttagaaacacccacaaacttcacatatcataattagcaaacaattggaaggaagttgcttgaatgttggggagaggaaaatctattggctctcgtgggtctcttcatctcagaaatgccaatcaggtcaaggtttgctacattttgtatgtgtgtgatgcttctcccaaaggtatattaactatataagagagttgtgacaaaacagaatgataaagctgcgaaccgtggcacacgctcatagttctagctgcttgggaggttgaggagggaggatggcttgaacacaggtgttcaaggccagcctgggcaacataacaagatcctgtctctcaaaaaaaaaaaaaaaaaaaagaaagagagagggccgggcgtggtggctcacgcctgtaatcccagcactttgggaggccgagccgggcggatcacctgtggtcaggagtttgagaccagcctggccaacatggcaaaaccccgtctgtactcaaaatgcaaaaattagccaggcgtggtagcaggcacctgtaatcccagctacttgggaggctgaggcaggagaatcgcttgaacccaggaggtggaggttgcagtaagctgagatcgtgccgttgcactccagcctgggcgacaagagcaagactctgtctcagaaaaaaaaaaaaaaaagagagagagagagaaagagaacaatatttgggagagaaggatggggaagcattgcaaggaaattgtgctttatccaacaaaatgtaaggagccaataagggatccctatttgtctcttttggtgtctatttgtccctaacaactgtctttgacagtgagaaaaatattcagaataaccatatccctgtgccgttattacctagcaacccttgcaatgaagatgagcagatccacaggaaaacttgaatgcacaactgtcttattttaatcttattgtacataagtttgtaaaagagttaaaaattgttacttcatgtattcatttatattttatattattttgcgtctaatgattttttattaacatgatttccttttctgatatattgaaatggagtctcaaagcttcataaatttataactttagaaatgattctaataacaacgtatgtaattgtaacattgcagtaatggtgctacgaagccatttctcttgatttttagtaaacttttatgacagcaaatttgcttctggctcactttcaatcagttaaataaatgataaataattttggaagctgtgaagataaaataccaaataaaataatataaaagtgatttatatgaagttaaaataaaaaatcagtatgatggaataaacttg

SEQ ID NO: 16 - protein, 198 aa, Homo sapiens [sequence omitted]

SEQ ID NO: 17 - protein, 198 aa, Canis lupus familiaris
  MISC_FEATURE (1)..(198): Canine AID (clAID) polypeptide sequence
  MISC_FEATURE (1)..(30): Nuclear localization sequence
  MISC_FEATURE (183)..(198): Nuclear export signal
MDSLLMKQRKFLYHFKNVRWAKGRHETYLCYVVKRRDSATSFSLDFGHLRNKSGCHVELLFLRYISDWDLDPGRCYRVTWFTSWSPCYDCARHVADFLRGYPNLSLRIFAARLYFCEDRKAEPEGLRRLHRAGVQIAIMTFKDYFYCWNTFVENREKTFKAWEGLHENSVRLSRQLRRILLPLYEVDDLRDAFRTLGL

SEQ ID NO: 18 - protein, 199 aa, Bos Taurus
  MISC_FEATURE (1)..(199): Bovine AID (btAID) polypeptide sequence
  MISC_FEATURE (1)..(30): Nuclear localization sequence
  MISC_FEATURE (183)..(199): Nuclear export signal
MDSLLKKQRQFLYQFKNVRWAKGRHETYLCYVVKRRDSPTSFSLDFGHLRNKAGCHVELLFLRYISDWDLDPGRCYRVTWFTSWSPCYDCARHVADFLRGYPNLSLRIFTARLYFCDKERKAEPEGLRRLHRAGVQIAIMTFKDYFYCWNTFVENHERTFKAWEGLHENSVRLSRQLRRILLPLYEVDDLRDAFRTLGL

SEQ ID NO: 19 - protein, 239 aa, Rattus
  MISC_FEATURE (1)..(239): Rat AID polypeptide sequence
  MISC_FEATURE (1)..(26): Nuclear localization sequence
  MISC_FEATURE (194)..(239): Nuclear export signal
MAVGSKPKAALVGPHWERERIWCFLCSTGLGTQQTGQTSRWLRPAATQDPVSPPRSLLMKQRKFLYHFKNVRWAKGRHETYLCYVVKRRDSATSFSLDFGYLRNKSGCHVELLFLRYISDWDLDPGRCYRVTWFTSWSPCYDCARHVADFLRGNPNLSLRIFTARLTGWGALPAGLMSPARPSDYFYCWNTFVENHERTFKAWEGLHENSVRLSRRLRRILLPLYEVDDLRDAFRTLGL

SEQ ID NO: 20 - protein, 198 aa, Mus musculus [sequence omitted]

SEQ ID NO: 21 - protein, 229 aa, Rattus norvegicus [sequence omitted]

SEQ ID NO: 22 - protein, 229 aa, Mesocricetus auratus
  MISC_FEATURE (1)..(229): maAPOBEC-1 polypeptide sequence
MSSETGPVVVDPTLRRRIEPHEFDAFFDQGELRKETCLLYEIRWGGRHNIWRHTGQNTSRHVEINFIEKFTSERYFYPSTRCSIVWFLSWSPCGECSKAITEFLSGHPNVTLFIYAARLYHHTDQRNRQGLRDLISRGVTIRIMTEQEYCYCWRNFVNYPPSNEVYWPRYPNLWMRLYALELYCIHLGLPPCLKIKRRHQYPLTFFRLNLQSCHYQRIPPHILWATGFI

SEQ ID NO: 23 - protein, 236 aa, Pongo pygmaeus
  MISC_FEATURE (1)..(236): ppAPOBEC-1 polypeptide sequence
MTSEKGPSTGDPTLRRRIESWEFDVFYDPRELRKETCLLYEIKWGMSRKIWRSSGKNTTNHVEVNFIKKFTSERRFHSSISCSITWFLSWSPCWECSQAIREFLSQHPGVTLVIYVARLFWHMDQRNRQGLRDLVNSGVTIQIMRASEYYHCWRNFVNYPPGDEAHWPQYPPLWMMLYALELHCIILSLPPCLKISRRWQNHLAFFRLHLQNCHYQTIPPHILLATGLIHPSVTWR

SEQ ID NO: 24 - protein, 236 aa, Oryctolagus cuniculus
  MISC_FEATURE (1)..(236): ocAPOBEC1 polypeptide sequence
MASEKGPSNKDYTLRRRIEPWEFEVFFDPQELRKEACLLYEIKWGASSKTWRSSGKNTTNHVEVNFLEKLTSEGRLGPSTCCSITWFLSWSPCWECSMAIREFLSQHPGVTLIIFVARLFQHMDRRNRQGLKDLVTSGVTVRVMSVSEYCYCWENFVNYPPGKAAQWPRYPPRWMLMYALELYCIILGLPPCLKISRRHQKQLTFFSLTPQYCHYKMIPPYILLATGLLQPSVPWR

SEQ ID NO: 25 - protein, 235 aa, Monodelphis domestica
  MISC_FEATURE (1)..(235): mdAPOBEC-1 polypeptide sequence
MNSKTGPSVGDATLRRRIKPWEFVAFFNPQELRKETCLLYEIKWGNQNIWRHSNQNTSQHAEINFMEKFTAERHFNSSVRCSITWFLSWSPCWECSKAIRKFLDHYPNVTLAIFISRLYWHMDQQHRQGLKELVHSGVTIQIMSYSEYHYCWRNFVDYPQGEEDYWPKYPYLWIMLYVLELHCIILGLPPCLKISGSHSNQLALFSLDLQDCHYQKIPYNVLVATGLVQPFVTWR

SEQ ID NO: 26 - protein, 224 aa, Pongo pygmaeus
  MISC_FEATURE (1)..(224): ppAPOBEC-2 polypeptide sequence
MAQKEEAAAATEAASQNGEDLENLDDPEKLKELIELPPFEIVTGERLPANFFKFQFRNVEYSSGRNKTFLCYVVEAQGKGGQVQASRGYLEDEHAAAHAEEAFFNTILPAFDPALRYNVTWYVSSSPCAACADRIIKTLSKTKNLRLLILVGRLFMWEELEIQDALKKLKEAGCKLRIMKPQDFEYVWQNFVEQEEGESKAFQPWEDIQENFLYYEEKLADILK

SEQ ID NO: 27 - protein, 224 aa, Bos Taurus
  MISC_FEATURE (1)..(224): btAPOBEC-2 polypeptide sequence
MAQKEEAAAAAEPASQNGEEVENLEDPEKLKELIELPPFEIVTGERLPAHYFKFQFRNVEYSSGRNKTFLCYVVEAQSKGGQVQASRGYLEDEHATNHAEEAFFNSIMPTFDPALRYMVTWYVSSSPCAACADRIVKTLNKTKNLRLLILVGRLFMWEEPEIQAALRKLKEAGCRLRIMKPQDFEYIWQNFVEQEEGESKAFEPWEDIQENFLYYEEKLADILK

SEQ ID NO: 28 - protein, 440 aa, Mus musculus
  MISC_FEATURE (1)..(440): mAPOBEC-3-(1) polypeptide sequence
MQPQRLGPRAGMGPFCLGCSHRKCYSPIRNLISQETFKFHFKNLGYAKGRKDTFLCYEVTRKDCDSPVSLHHGVFKNKDNIHAEICFLYWFHDKVLKVLSPREEFKITWYMSWSPCFECAEQIVRFLATHHNLSLDIFSSRLYNVQDPETQQNLCRLVQEGAQVAAMDLYEFKKCWKKFVDNGGRRFRPWKRLLTNFRYQDSKLQEILRPCYISVPSSSSSTLSNICLTKGLPETRFWVEGRRMDPLSEEEFYSQFYNQRVKHLCYYHRMKPYLCYQLEQFNGQAPLKGCLLSEKGKQHAEILFLDKIRSMELSQVTITCYLTWSPCPNCAWQLAAFKRDRPDLILHIYTSRLYFHWKRPFQKGLCSLWQSGILVDVMDLPQFTDCWTNFVNPKRPFWPWKGLEIISRRTQRRLRRIKESWGLQDLVNDFGNLQLGPPMS

SEQ ID NO: 29 - protein, 429 aa, Mus musculus
  MISC_FEATURE (1)..(429): APOBEC-3-(2) (Mouse APOBEC-3) polypeptide sequence
  MISC_FEATURE (71)..(108): Nucleic acid editing domain
  MISC_FEATURE (288)..(319): Nucleic acid editing domain
MGPFCLGCSHRKCYSPIRNLISQETFKFHFKNLGYAKGRKDTFLCYEVTRKDCDSPVSLHHGVFKNKDNIHAEICFLYWFHDKVLKVLSPREEFKITWYMSWSPCFECAEQIVRFLATHHNLSLDIFSSRLYNVQDPETQQNLCRLVQEGAQVAAMDLYEFKKCWKKFVDNGGRRFRPWKRLLTNFRYQDSKLQEILRPCYIPVPSSSSSTLSNICLTKGLPETRFCVEGRRMDPLSEEEFYSQFYNQRVKHLCYYHRMKPYLCYQLEQFNGQAPLKGCLLSEKGKQHAEILFLDKIRSMELSQVTITCYLTWSPCPNCAWQLAAFKRDRPDLILHIYTSRLYFHWKRPFQKGLCSLWQSGILVDVMDLPQFTDCWTNFVNPKRPFWPWKGLEIISRRTQRRLRRIKESWGLQDLVNDFGNLQLGPPMS

SEQ ID NO: 30 - protein, 430 aa, Rattus
  MISC_FEATURE (1)..(430): APOBEC-3 polypeptide sequence
  MISC_FEATURE (72)..(109): Nucleic acid editing domain
  MISC_FEATURE (289)..(320): Nucleic acid editing domain
MGPFCLGCSHRKCYSPIRNLISQETFKFHFKNRLRYAIDRKDTFLCYEVTRKDCDSPVSLHHGVFKNKDNIHAEICFLYWFHDKVLKVLSPREEFKITWYMSWSPCFECAEQVLRFLATHHNLSLDIFSSRLYNIRDPENQQNLCRLVQEGAQVAAMDLYEFKKCWKKFVDNGGRRFRPWKKLLTNFRYQDSKLQEILRPCYIPVPSSSSSTLSNICLTKGLPETRFCVERRRVHLLSEEEFYSQFYNQRVKHLCYYHGVKPYLCYQLEQFNGQAPLKGCLLSEKGKQHAEILFLDKIRSMELSQVIITCYLTWSPCPNCAWQLAAFKRDRPDLILHIYTSRLYFHWKRPFQKGLCSLWQSGILVDVMDLPQFTDCWTNFVNPKRPFWPWKGLEIISRRTQRRLHRIKESWGLQDLVNDFGNLQLGPPMS

SEQ ID NO: 31 - protein, 199 aa, Homo sapiens
  MISC_FEATURE (1)..(199): hAPOBEC-3A polypeptide sequence
  MISC_FEATURE (70)..(106): Nucleic acid editing domain
MEASPASGPRHLMDPHIFTSNFNNGIGRHKTYLCYEVERLDNGTSVKMDQHRGFLHNQAKNLLCGFYGRHAELRFLDLVPSLQLDPAQIYRVTWFISWSPCFSWGCAGEVRAFLQENTHVRLRIFAARIYDYDPLYKEALQMLRDAGAQVSIMTYDEFKHCWDTFVDHQGCPFQPWDGLDEHSQALSGRLRAILQNQGN

SEQ ID NO: 32 - protein, 373 aa, Homo sapiens
  MISC_FEATURE (1)..(373): hAPOBEC-3F polypeptide sequence
  MISC_FEATURE (65)..(99): Nucleic acid editing domain
  MISC_FEATURE (248)..(283): Nucleic acid editing domain
MKPHFRNTVERMYRDTFSYNFYNRPILSRRNTVWLCYEVKTKGPSRPRLDAKIFRGQVYSQPEHHAEMCFLSWFCGNQLPAYKCFQITWFVSWTPCPDCVAKLAEFLAEHPNVTLTISAARLYYYWERDYRRALCRLSQAGARVKIMDDEEFAYCWENFVYSEGQPFMPWYKFDDNYAFLHRTLKEILRNPMEAMYPHIFYFHFKNLRKAYGRNESWLCFTMEVVKHHSPVSWKRGVFRNQVDPETHCHAERCFLSWFCDDILSPNTNYEVTWYTSWSPCPECAGEVAEFLARHSNVNLTIFTARLYYFWDTDYQEGLRSLSQEGASVEIMGYKDFKYCWENFVYNDDEPFKPWKGLKYNFLFLDSKLQEILE

SEQ ID NO: 33 - protein, 370 aa, Rhesus macaque
  MISC_FEATURE (1)..(370): Rhesus macaque APOBEC-3G polypeptide sequence
  MISC_FEATURE (1)..(61): Cytoplasmic localization signal
MVEPMDPRTFVSNFNNRPILSGLNTVWLCCEVKTKDPSGPPLDAKIFQGKVYSKAKYHPEMRFLRWFHKWRQLHHDQEYKVTWYVSWSPCTRCANSVATFLAKDPKVTLTIFVARLYYFWKPDYQQALRILCQKRGGPHATMKIMNYNEFQDCWNKFVDGRGKPFKPRNNLPKHYTLLQATLGELLRHLMDPGTFTSNFNNKPWVSGQHETYLCYKVERLHNDTWVPLNQHRGFLRNQAPNIHGFPKGRHAELCFLDLIPFWKLDGQQYRVTCFTSWSPCFSCAQEMAKFISNNEHVSLCIFAARIYDDQGRYQEGLRALHRDGAKIAMMNYSEFEYCWDTFVDRQGRPFQPWDGLDEHSQALSGRLRAI

SEQ ID NO: 34 - protein, 384 aa, Pan troglodytes
  MISC_FEATURE (1)..(384): Chimpanzee APOBEC-3G polypeptide sequence
  MISC_FEATURE (1)..(60): Cytoplasmic localization signal
  MISC_FEATURE (65)..(100): Nucleic acid editing domain
  MISC_FEATURE (257)..(291): Nucleic acid editing domain
MKPHFRNPVERMYQDTFSDNFYNRPILSHRNTVWLCYEVKTKGPSRPPLDAKIFRGQVYSKLKYHPEMRFFHWFSKWRKLHRDQEYEVTWYISWSPCTKCTRDVATFLAEDPKVTLTIFVARLYYFWDPDYQEALRSLCQKRDGPRATMKIMNYDEFQHCWSKFVYSQRELFEPWNNLPKYYILLHIMLGEILRHSMDPPTFTSNFNNELWVRGRHETYLCYEVERLHNDTWVLLNQRRGFLCNQAPHKHGFLEGRHAELCFLDVIPFWKLDLHQDYRVTCFTSWSPCFSCAQEMAKFISNNKHVSLCIFAARIYDDQGRCQEGLRTLAKAGAKISIMTYSEFKHCWDTFVDHQGCPFQPWDGLEEHSQALSGRLRAILQNQGN

SEQ ID NO: 35 - protein, 377 aa, Chlorocebus sabaeus
  MISC_FEATURE (1)..(377): Green monkey APOBEC-3G polypeptide sequence
  MISC_FEATURE (1)..(60): Cytoplasmic localization signal
  MISC_FEATURE (65)..(100): Nucleic acid editing domain
  MISC_FEATURE (257)..(290): Nucleic acid editing domain
MNPQIRNMVEQMEPDIFVYYFNNRPILSGRNTVWLCYEVKTKDPSGPPLDANIFQGKLYPEAKDHPEMKFLHWFRKWRQLHRDQEYEVTWYVSWSPCTRCANSVATFLAEDPKVTLTIFVARLYYFWKPDYQQALRILCQERGGPHATMKIMNYNEFQHCWNEFVDGQGKPFKPRKNLPKHYTLLHATLGELLRHVMDPGTFTSNFNNKPWVSGQRETYLCYKVERSHNDTWVLLNQHRGFLRNQAPDRHGFPKGRHAELCFLDLIPFWKLDDQQYRVTCFTSWSPCFSCAQKMAKFISNNKHVSLCIFAARIYDDQGRCQEGLRTLHRDGAKIAVMNYSEFEYCWDTFVDRQGRPFQPWDGLDEHSQALSGRLRAI

SEQ ID NO: 36 - protein, 384 aa, Homo sapiens
  MISC_FEATURE (1)..(384): Human APOBEC-3G polypeptide sequence
  MISC_FEATURE (1)..(60): Cytoplasmic localization signal
  MISC_FEATURE (65)..(100): Nucleic acid editing domain
  MISC_FEATURE (257)..(291): Nucleic acid editing domain
MKPHFRNTVERMYRDTFSYNFYNRPILSRRNTVWLCYEVKTKGPSRPPLDAKIFRGQVYSELKYHPEMRFFHWFSKWRKLHRDQEYEVTWYISWSPCTKCTRDMATFLAEDPKVTLTIFVARLYYFWDPDYQEALRSLCQKRDGPRATMKIMNYDEFQHCWSKFVYSQRELFEPWNNLPKYYILLHIMLGEILRHSMDPPTFTFNFNNEPWVRGRHETYLCYEVERMHNDTWVLLNQRRGFLCNQAPHKHGFLEGRHAELCFLDVIPFWKLDLDQDYRVTCFTSWSPCFSCAQEMAKFISKNKHVSLCIFTARIYDDQGRCQEGLRTLAEAGAKISIMTYSEFKHCWDTFVDHQGCPFQPWDGLDEHSQDLSGRLRAILQNQEN

SEQ ID NO: 37 - protein, 382 aa, Homo sapiens
  MISC_FEATURE (1)..(382): Human APOBEC-3B polypeptide sequence
  MISC_FEATURE (66)..(100): Nucleic acid editing domain
  MISC_FEATURE (251)..(289): Nucleic acid editing domain
MNPQIRNPMERMYRDTFYDNFENEPILYGRSYTWLCYEVKIKRGRSNLLWDTGVFRGQVYFKPQYHAEMCFLSWFCGNQLPAYKCFQITWFVSWTPCPDCVAKLAEFLSEHPNVTLTISAARLYYYWERDYRRALCRLSQAGARVTIMDYEEFAYCWENFVYNEGQQFMPWYKFDENYAFLHRTLKEILRYLMDPDTFTFNFNNDPLVLRRRQTYLCYEVERLDNGTWVLMDQHMGFLCNEAKNLLCGFYGRHAELRFLDLVPSLQLDPAQIYRVTWFISWSPCFSWGCAGEVRAFLQENTHVRLRIFAARIYDYDPLYKEALQMLRDAGAQVSIMTYDEFEYCWDTFVYRQGCPFQPWDGLEEHSQALSGRLRAILQNQGN

SEQ ID NO: 38 - protein, 395 aa, Rattus
  MISC_FEATURE (1)..(395): Rat APOBEC-3B polypeptide sequence
MQPQGLGPNAGMGPVCLGCSHRRPYSPIRNPLKKLYQQTFYFHFKNVRYAWGRKNNFLCYEVNGMDCALPVPLRQGVFRKQGHIHAELCFIYWFHDKVLRVLSPMEEFKVTWYMSWSPCSKCAEQVARFLAAHRNLSLAIFSSRLYYYLRNPNYQQKLCRLIQEGVHVAAMDLPEFKKCWNKFVDNDGQPFRPWMRLRINFSFYDCKLQEIFSRMNLLREDVFYLQFNNSHRVKPVQNRYYRRKSYLCYQLERANGQEPLKGYLLYKKGEQHVEILFLEKMRSMELSQVRITCYLTWSPCPNCARQLAAFKKDHPDLILRIYTSRLYFWRKKFQKGLCTLWRSGIHVDVMDLPQFADCWTNFVNPQRPFRPWNELEKNSWRIQRRLRRIKESWGL

SEQ ID NO: 39 - protein, 226 aa, Bos Taurus
  MISC_FEATURE (1)..(226): Bovine APOBEC-3B polypeptide sequence
DGWEVAFRSGTVLKAGVLGVSMTEGWAGSGHPGQGACVWTPGTRNTMNLLREVLFKQQFGNQPRVPAPYYRRKTYLCYQLKQRNDLTLDRGCFRNKKQRHAERFIDKINSLDLNPSQSYKIICYITWSPCPNCANELVNFITRNNHLKLEIFASRLYFHWIKSFKMGLQDLQNAGISVAVMTHTEFEDCWEQFVDNQSRPFQPWDKLEQYSASIRRRLQRILTAPI

SEQ ID NO: 40 - protein, 490 aa, Pan troglodytes
  MISC_FEATURE (1)..(490): Chimpanzee APOBEC-3B polypeptide sequence
MNPQIRNPMEWMYQRTFYYNFENEPILYGRSYTWLCYEVKIRRGHSNLLWDTGVFRGQMYSQPEHHAEMCFLSWFCGNQLSAYKCFQITWFVSWTPCPDCVAKLAKFLAEHPNVTLTISAARLYYYWERDYRRALCRLSQAGARVKIMDDEEFAYCWENFVYNEGQPFMPWYKFDDNYAFLHRTLKEIIRHLMDPDTFTFNFNNDPLVLRRHQTYLCYEVERLDNGTWVLMDQHMGFLCNEAKNLLCGFYGRHAELRFLDLVPSLQLDPAQIYRVTWFISWSPCFSWGCAGQVRAFLQENTHVRLRIFAARIYDYDPLYKEALQMLRDAGAQVSIMTYDEFEYCWDTFVYRQGCPFQPWDGLEEHSQALSGRLRAILQVRASSLCMVPHRPPPPPQSPGPCLPLCSEPPLGSLLPTGRPAPSLPFLLTASFSFPPPASLPPLPSLSLSPGHLPVPSFHSLTSCSIQPPCSSRIRETEGWASVSKEGRDLG

SEQ ID NO: 41 - protein, 190 aa, Homo sapiens
  MISC_FEATURE (1)..(190): Human APOBEC-3C polypeptide sequence
  MISC_FEATURE (65)..(100): Nucleic acid editing domain
MNPQIRNPMKAMYPGTFYFQFKNLWEANDRNETWLCFTVEGIKRRSVVSWKTGVFRNQVDSETHCHAERCFLSWFCDDILSPNTKYQVTWYTSWSPCPDCAGEVAEFLARHSNVNLTIFTARLYYFQYPCYQEGLRSLSQEGVAVEIMDYEDFKYCWENFVYNDNEPFKPWKGLKTNFRLLKRRLRESLQ

SEQ ID NO: 42 - protein, 190 aa, Gorilla
  MISC_FEATURE (1)..(190): Gorilla APOBEC-3C polypeptide sequence
  MISC_FEATURE (65)..(100): Nucleic acid editing domain
MNPQIRNPMKAMYPGTFYFQFKNLWEANDRNETWLCFTVEGIKRRSVVSWKTGVFRNQVDSETHCHAERCFLSWECDDILSPNTNYQVTWYTSWSPCPECAGEVAEFLARHSNVNLTIFTARLYYFQDTDYQEGLRSLSQEGVAVKIMDYKDFKYCWENFVYNDDEPFKPWKGLKYNFRFLKRRLQEILE

SEQ ID NO: 43 - protein, 202 aa, Rhesus macaque
  MISC_FEATURE (1)..(202): Rhesus macaque APOBEC-3A polypeptide sequence
  MISC_FEATURE (72)..(103): Nucleic acid editing domain
MDGSPASRPRHLMDPNTFTFNFNNDLSVRGRHQTYLCYEVERLDNGTWVPMDERRGFLCNKAKNVPCGDYGCHVELRFLCEVPSWQLDPAQTYRVTWFISWSPCFRRGCAGQVRVFLQENKHVRLRIFAARIYDYDPLYQEALRTLRDAGAQVSIMTYEEFKHCWDTFVDRQGRPFQPWDGLDEHSQALSGRLRAILQNQGN

SEQ ID NO: 44 - protein, 185 aa, Bos Taurus
  MISC_FEATURE (1)..(185): Bovine APOBEC-3A polypeptide sequence
  MISC_FEATURE (56)..(86): Nucleic acid editing domain
MDEYTFTENFNNQGWPSKTYLCYEMERLDGDATIPLDEYKGFVRNKGLDQPEKPCHAELYFLGKIHSWNLDRNQHYRLTCFISWSPCYDCAQKLTTFLKENHHISLHILASRIYTHNRFGCHQSGLCELQAAGARITIMTFEDFKHCWETFVDHKGKPFQPWEGLNVKSQALCTELQAILKTQQN

SEQ ID NO: 45 - protein, 200 aa, Homo sapiens
  MISC_FEATURE (1)..(200): Human APOBEC-3H polypeptide sequence
  MISC_FEATURE (54)..(88): Nucleic acid editing domain
MALLTAETFRLQFNNKRRLRRPYYPRKALLCYQLTPQNGSTPTRGYFENKKKCHAEICFINEIKSMGLDETQCYQVTCYLTWSPCSSCAWELVDFIKAHDHLNLGIFASRLYYHWCKPQQKGLRLLCGSQVPVEVMGFPKFADCWENFVDHEKPLSFNPYKMLEELDKNSRAIKRRLERIKIPGVRAQGRYMDILCDAEV

SEQ ID NO: 46 - protein, 210 aa, Rhesus macaque
  MISC_FEATURE (1)..(210): Rhesus macaque APOBEC-3H polypeptide sequence
MALLTAKTFSLQFNNKRRVNKPYYPRKALLCYQLTPQNGSTPTRGHLKNKKKDHAEIRFINKIKSMGLDETQCYQVTCYLTWSPCPSCAGELVDFIKAHRHLNLRIFASRLYYHWRPNYQEGLLLLCGSQVPVEVMGLPEFTDCWENFVDHKEPPSFNPSEKLEELDKNSQAIKRRLERIKSRSVDVLENGLRSLQLGPVTPSSSIRNSR

SEQ ID NO: 47 - protein, 386 aa, Homo sapiens
  MISC_FEATURE (1)..(386): Human APOBEC-3D polypeptide sequence
  MISC_FEATURE (78)..(109): Nucleic acid editing domain
  MISC_FEATURE (262)..(296): Nucleic acid editing domain
MNPQIRNPMERMYRDTFYDNFENEPILYGRSYTWLCYEVKIKRGRSNLLWDTGVFRGPVLPKRQSNHRQEVYFRFENHAEMCFLSWFCGNRLPANRRFQITWFVSWNPCLPCVVKVTKFLAEHPNVTLTISAARLYYYRDRDWRWVLLRLHKAGARVKIMDYEDFAYCWENFVCNEGQPFMPWYKFDDNYASLHRTLKEILRNPMEAMYPHIFYFHFKNLLKACGRNESWLCFTMEVTKHHSAVFRKRGVFRNQVDPETHCHAERCFLSWFCDDILSPNTNYEVTWYTSWSPCPECAGEVAEFLARHSNVNLTIFTARLCYFWDTDYQEGLCSLSQEGASVKIMGYKDFVSCWKNFVYSDDEPFKPWKGLQTNFRLLKRRLREILQ

SEQ ID NO: 48 - protein, 236 aa, Homo sapiens
  MISC_FEATURE (1)..(236): Human APOBEC-1 polypeptide sequence
MTSEKGPSTGDPTLRRRIEPWEFDVFYDPRELRKEACLLYEIKWGMSRKIWRSSGKNTTNHVEVNFIKKFTSERDFHPSMSCSITWFLSWSPCWECSQAIREFLSRHPGVTLVIYVARLFWHMDQQNRQGLRDLVNSGVTIQIMRASEYYHCWRNFVNYPPGDEAHWPQYPPLWMMLYALELHCIILSLPPCLKISRRWQNHLTFFRLHLQNCHYQTIPPHILLATGLIHPSVAWR

SEQ ID NO: 49 - protein, 229 aa, Mus musculus
  MISC_FEATURE (1)..(229): Mouse APOBEC-1 polypeptide sequence
MSSETGPVAVDPTLRRRIEPHEFEVFFDPRELRKETCLLYEINWGGRHSVWRHTSQNTSNHVEVNFLEKFTTERYFRPNTRCSITWFLSWSPCGECSRAITEFLSRHPYVTLFIYIARLYHHTDQRNRQGLRDLISSGVTIQIMTEQEYCYCWRNFVNYPPSNEAYWPRYPHLWVKLYVLELYCIILGLPPCLKILRRKQPQLTFFTITLQTCHYQRIPPHLLWATGLK

SEQ ID NO: 50 - protein, 224 aa, Homo sapiens
  MISC_FEATURE (1)..(224): Human APOBEC-2 polypeptide sequence
MAQKEEAAVATEAASQNGEDLENLDDPEKLKELIELPPFEIVTGERLPANFFKFQFRNVEYSSGRNKTFLCYVVEAQGKGGQVQASRGYLEDEHAAAHAEEAFFNTILPAFDPALRYNVTWYVSSSPCAACADRIIKTLSKTKNLRLLILVGRLFMWEEPEIQAALKKLKEAGCKLRIMKPQDFEYVWQNFVEQEEGESKAFQPWEDIQENFLYYEEKLADILK

SEQ ID NO: 51 - protein, 224 aa, Mus musculus
  MISC_FEATURE (1)..(224): Mouse APOBEC-2 polypeptide sequence
MAQKEEAAEAAAPASQNGDDLENLEDPEKLKELIDLPPFEIVTGVRLPVNFFKFQFRNVEYSSGRNKTFLCYVVEVQSKGGQAQATQGYLEDEHAGAHAEEAFFNTILPAFDPALKYNVTWYVSSSPCAACADRILKTLSKTKNLRLLILVSRLFMWEEPEVQAALKKLKEAGCKLRIMKPQDFEYIWQNFVEQEEGESKAFEPWEDIQENFLYYEEKLADILK

SEQ ID NO: 52 - protein, 224 aa, Rattus
  MISC_FEATURE (1)..(224): Rat APOBEC-2 polypeptide sequence
MAQKEEAAEAAAPASQNGDDLENLEDPEKLKELIDLPPFEIVTGVRLPVNFFKFQFRNVEYSSGRNKTFLCYVVEAQSKGGQVQATQGYLEDEHAGAHAEEAFFNTILPAFDPALKYNVTWYVSSSPCAACADRILKTLSKTKNLRLLILVSRLFMWEEPEVQAALKKLKEAGCKLRIMKPQDFEYLWQNFVEQEEGESKAFEPWEDIQENFLYYEEKLADILK

SEQ ID NO: 53 - protein, 208 aa, Petromyzon marinus
  MISC_FEATURE (1)..(208): Petromyzon marinus CDA1 (pmCDAl) polypeptide sequence
MTDAEYVRIHEKLDIYTFKKQFFNNKKSVSHRCYVLFELKRRGERRACFWGYAVNKPQSGTERGIHAEIFSIRKVEEYLRDNPGQFTINWYSSWSPCADCAEKILEWYNQELRGNGHTLKIWACKLYYEKNARNQIGLWNLRDNGVGLNVMVSEHYQCCRKIFIQSSHNQLNENRWLEKTLKRAEKRRSELSFMIQVKILHTTKSPAV

SEQ ID NO: 54 - protein, 381 aa, Homo sapiens
  MISC_FEATURE (1)..(381): Human APOBEC3G D316R D317R polypeptide sequence
MKPHFRNTVERMYRDTFSYNFYNRPILSRRNTVWLCYEVKTKGPSRPPLDAKIFRGQVYSELKYHPEMRFFHWFSKWRKLHRDQEYEVTWYISWSPCTKCTRDMATFLAEDPKVTLTIFVARLYYFWDPDYQEALRSLCQKRDGPRATMKFNYDEFQHCWSKFVYSQRELFEPWNNLPKYYILLHFMLGEILRHSMDPPTFTFNFNNEPWVRGRHETYLCYEVERMHNDTWVLLNQRRGFLCNQAPHKHGFLEGRHAELCFLDVIPFWKLDLDQDYRVTCFTSWSPCFSCAQEMAKFISKKHVSLCIFTARIYRRQGRCQEGLRTLAEAGAKISFTYSEFKHCWDTFVDHQGCPFQPWDGLDEHSQDLSGRLRAILQNQEN

SEQ ID NO: 55 - protein, 182 aa, Homo sapiens
  MISC_FEATURE (1)..(182): Human APOBEC3G chain A polypeptide sequence
MDPPTFTFNFNNEPWWGRHETYLCYEVERMHNDTWVLLNQRRGFLCNQAPHKHGFLEGRHAELCFLDVIPFWKLDLDQDYRVTCFTSWSPCFSCAQEMAKFISKNKHVSLCIFTARIYDDQGRCQEGLRTLAEAGAKISFTYSEFKHCWDTFVDHQGCPFQPWDGLDEHSQDLSGRLRAILQ

SEQ ID NO: 56 - protein, 184 aa, Homo sapiens
  MISC_FEATURE (1)..(184): Human APOBEC3G chain A D120R D121R polypeptide sequence
MDPPTFTFNFNNEPWVRGRHETYLCYEVERMHNDTWVLLNQRRGFLCNQAPHKHGFLEGRHAELCFLDVIPFWKLDLDQDYRVTCFTSWSPCFSCAQEMAKFISKNKHVSLCIFTARIYRRQGRCQEGLRTLAEAGAKISFMTYSEFKHCWDTFVDHQGCPFQPWDGLDEHSQDLSGRLRAILQ

SEQ ID NO: 57 - protein, 367 aa, Homo sapiens
  MISC_FEATURE (1)..(367): hAPOBEC-4 polypeptide sequence
MEPIYEEYLANHGTIVKPYYWLSFSLDCSNCPYHIRTGEEARVSLTEFCQIFGFPYGTTFPQTKHLTFYELKTSSGSLVQKGHASSCTGNYIHPESMLFEMNGYLDSAIYNNDSIRHIILYSNNSPCNEANHCCISKMYNFLITYPGITLSIYFSQLYHTEMDFPASAWNREALRSLASLWPRVVLSPISGGIWHSVLHSFISGVSGSHVFQPILTGRALADRHNAYEINAITGVKPYFTDVLLQTKRNPNTKAQEALESYPLNNAFPGQFFQMPSGQLQPNLPPDLRAPVVFVLVPLRDLPPMHMGQNPNKPRNIVRHLNMPQMSFQETKDLGRLPTGRSVEIVEITEQFASSKEADEKKKKKGKK

SEQ ID NO: 58 - protein, 388 aa, Rattus norvegicus
  MISC_FEATURE (1)..(388): rAPOBEC-4 polypeptide sequence
MEPLYEEYLTHSGTIVKPYYWLSVSLNCTNCPYHIRTGEEARVPYTEFHQTFGFPWSTYPQTKHLTFYELRSSSGNLIQKGLASNCTGSHTHPESMLFERDGYLDSLIFHDSNIRHIILYSNNSPCDEANHCCISKMYNFLMNYPEVTLSVFFSQLYHTENQFPTSAWNREALRGLASLWPQVTLSAISGGIWQSILETFVSGISEGLTAVRPFTAGRTLTDRYNAYEINCITEVKPYFTDALHSWQKENQDQKVWAASENQPLHNTTPAQWQPDMSQDCRTPAVFMLVPYRDLPPIHVNPSPQKPRTVVRHLNTLQLSASKVKALRKSPSGRPVKKEEARKGSTRSQEANETNKSKWKKQTLFIKSNICHLLEREQKKIGILSSWSV

SEQ ID NO: 59 - protein, 363 aa, Macaca fascicularis
  MISC_FEATURE (1)..(363): mfAPOBEC-4 polypeptide sequence
MEPTYEEYLANHGTIVKPYYWLSFSLDCSNCPYHIRTGEEARVSLTEFCQIFGFPYGTTYPQTKHLTFYELKTSSGSLVQKGHASSCTGNYIHPESMLFEMNGYLDSAIYNNDSIRHIILYCNNSPCNEANHCCISKVYNFLITYPGITLSIYFSQLYHTEMDFPASAWNREALRSLASLWPRVVLSPISGGIWHSVLHSFVSGVSGSHVFQPILTGRALTDRYNAYEINAITGVKPFFTDVLLHTKRNPNTKAQMALESYPLNNAFPGQSFQMTSGIPPDLRAPVVFVLLPLRDLPPMHMGQDPNKPRNIIRHLNMPQMSFQETKDLERLPTRRSVETVEITERFASSKQAEEKTKKKKGKK

SEQ ID NO: 60 - protein, 218 aa, Rattus norvegicus
  MISC_FEATURE (1)..(218): rAPOBEC-1 (delta 177-186) polypeptide sequence
MSSETGPVAVDPTLRRRIEPHEFEVFFDPRELRKETCLLYEINWGGRHSIWRHTSQNTNKHVEVNFIEKFTTERYFCPNTRCSITWFLSWSPCGECSRAITEFLSRYPHVTLFIYIARLYHHADPRNRQGLRDLISSGVTIQIMTEQESGYCWRNFVNYSPSNEAHWPRYPHLWVRGLPPCLNILRRKQPQLTFFTIALQSCHYQRLPPHILWATGLK

SEQ ID NO: 61 - protein, 218 aa, Rattus norvegicus
  MISC_FEATURE (1)..(218): rAPOBEC-1 (delta 202-213) polypeptide sequence
MSSETGPVAVDPTLRRRIEPHEFEVFFDPRELRKETCLLYEINWGGRHSIWRHTSQNTNKHVEVNFIEKFTTERYFCPNTRCSITWFLSWSPCGECSRAITEFLSRYPHVTLFIYIARLYHHADPRNRQGLRDLISSGVTIQIMTEQESGYCWRNFVNYSPSNEAHWPRYPHLWVRLYVLELYCIILGLPPCLNILRRKQPQHYQRLPPHILWATGLK

SEQ ID NO: 62 - protein, 198 aa, Mus musculus
  MISC_FEATURE (1)..(198): mouse cytidine deaminase polypeptide sequence
  MISC_FEATURE (1)..(30): Nuclear localization sequence
  MISC_FEATURE (183)..(198): Nuclear export signal
MDSLLMKQKKFLYHFKNVRWAKGRHETYLCYVVKRRDSATSCSLDFGHLRNKSGCHVELLFLRYISDWDLDPGRCYRVTWFTSWSPCYDCARHVAEFLRWNPNLSLRIFTARLYFCEDRKAEPEGLRRLHRAGVQIGIMTFKDYFYCWNTFVENRERTFKAWEGLHENSVRLTRQLRRILLPLYEVDDLRDAFRMLGF

SEQ ID NO: 63 - protein, 224 aa, Petromyzon marinus
  MISC_FEATURE (1)..(224): pmCDA-1 polypeptide sequence
MAGYECVRVSEKLDFDTFEFQFENLHYATERHRTYVIFDVKPQSAGGRSRRLWGYIINNPNVCHAELILMSMIDRHLESNPGVYAMTWYMSWSPCANCSSKLNPWLKNLLEEQGHTLTMHFSRIYDRDREGDHRGLRGLKHVSNSFRMGVVGRAEVKECLAEYVEASRRTLTWLDTTESMAAKMRRKLFCILVRCAGMRESGIPLHLFTLQTPLLSGRVVWWRV

SEQ ID NO: 64 - protein, 331 aa, Petromyzon marinus
  MISC_FEATURE (1)..(331): pmCDA-2 polypeptide sequence
MELREVVDCALASCVRHEPLSRVAFLRCFAAPSQKPRGTVILFYVEGAGRGVTGGHAVNYNKQGTSIHAEVLLLSAVRAALLRRRRCEDGEEATRGCTLHCYSTYSPCRDCVEYIQEFGASTGVRVVIHCCRLYELDVNRRRSEAEGVLRSLSRLGRDFRLMGPRDAIALLLGGRLANTADGESGASGNAWVTETNVVEPLVDMTGFGDEDLHAQVQRNKQIREAYANYASAVSLMLGELHVDPDKFPFLAEFLAQTSVEPSGTPRETRGRPRGASSRGPEIGRQRPADFERALGAYGLFLHPRIVSREADREEIKRDLIVVMRKHNYQGP

SEQ ID NO: 65 - protein, 209 aa, Petromyzon marinus
  MISC_FEATURE (1)..(209): pmCDA-5  polypeptide sequence
MAGDENVRVSEKLDFDTFEFQFENLHYATERHRTYVIFDVKPQSAGGRSRRLWGYIINNPNVCHAELILMSMIDRHLESNPGVYAMTWYMSWSPCANCSSKLNPWLKNLLEEQGHTLMMHFSRIYDRDREGDHRGLRGLKHVSNSFRMGVVGRAEVKECLAEYVEASRRTLTWLDTTESMAAKMRRKLFCILVRCAGMRESGMPLHLFT

SEQ ID NO: 66 - protein, 158 aa, Saccharomyces cerevisiae
  MISC_FEATURE (1)..(158): yCD polypeptide sequence
MVTGGMASKWDQKGMDIAYEEAALGYKEGGVPIGGCLINNKDGSVLGRGHNMRFQKGSATLHGEISTLENCGRLEGKVYKDTTLYTTLSPCDMCTGAIIMYGIPRCVVGENVNFKSKGEKYLQTRGHEVVVVDDERCKKIMKQFIDERPQDWFEDIGE

SEQ ID NO: 67 - protein, 194 aa, Artificial Sequence
  Description of artificial sequence: cytidine deaminase polypeptide sequence
MKPQIRDHRPNPMEAMYPHIFYFHFENLEKAYGRNETWLCFTVEIIKQYLPVPWKKGVFRNQVDPETHCHAEKCFLSWFCNNTLSPKKNYQVTWYTSWSPCPECAGEVAEFLAEHSNVKLTIYTARLYYFWDTDYQEGLRSLSEEGASVEIMDYEDFQYCWENFVYDDGEPFKRWKGLKYNFQSLTRRLREILQ

SEQ ID NO: 68 - protein, 192 aa, Artificial Sequence
  Description of artificial sequence: cytidine deaminase polypeptide sequence
MADSSEKMRGQYISRDTFEKNYKPIDGTKEAHLLCEIKWGKYGKPWLHWCQNQRMNIHAEDYFMNNIFKAKKHPVHCYVTWYLSWSPCADCASKIVKFLEERPYLKLTIYVAQLYYHTEEENRKGLRLLRSKKVIIRVMDISDYNYCWKVFVSNQNGNEDYWPLQFDPWVKENYSRLLDIFWESKCRSPNPW

SEQ ID NO: 69 - protein, 280 aa, Artificial Sequence
  Description of artificial sequence: cytidine deaminase polypeptide sequence
MDPQRLRQWPGPGPASRGGYGQRPRIRNPEEWFHELSPRTFSFHFRNLRFASGRNRSYICCQVEGKNCFFQGIFQNQVPPDPPCHAELCFLSWFQSWGLSPDEHYYVTWFISWSPCCECAAKVAQFLEENRNVSLSLSAARLYYFWKSESREGLRRLSDLGAQVGIMSFQDFQHCWNNFVHNLGMPFQPWKKLHKNYQRLVTELKQILREEPATYGSPQAQGKVRIGSTAAGLRHSHSHTRSEAHLRPNHSSRQHRILNPPREARARTCVLVDASWICYR

SEQ ID NO: 70 - protein, 555 aa, Artificial Sequence
  Description of artificial sequence: pYY-BEM3.1; tr|F7B644|F7B644_HORSE polypeptide sequence
MPRGRARERQRRNPMEKLDAEAFSFHFLNMEFVYDRNCSYLCYQVEGRLSGSPVLSEQGVFPNEVCGKTRRHAELCFLDWFRGRLSPDEYYCVTWFISWSPCSNCAREVAEFLKRHRNVELSIFAARLYYCRDHEQGLQSLCNRGAQLAVMLRKDFTYCWDNFVHNSGREFSPWENIDANSDLLARKLEDLLKNPMEKLHRKTFSFHFRNLKFAKGRKCSYLCYRVEGRLSGSPGLSEQGVFLNEVCDENCRHAELCFLHWFRGRLSPHADYRVTWFISWSPCSNCAREVAEFLKQHRNVELHISAARLYYWQRNKPGLRNLRSSGAQLAIMFFWDFRDCWDNFVHNSGRHFIPWKKINVNSRLLATKLEDLLKNPLEKLHPNTFSFHFCNLEFAYDRKYSYLCYQVEGRLSGSPGLSEQGVFLNEVCGKTRCHAELCFLDWFRVRLSPDEYYRVTWFISWSPCFYCAREVADFLKQYRNVKLSIFAARLYYCRDHAQGLRSLCSSGAQLAIMFFWDFRYCWDNFVHNSGREFRPWKKINVNSRLLATKLEDILK

SEQ ID NO: 71 - protein, 437 aa, Artificial Sequence
  Description of artificial sequence: pYY-BEM3.2; tr|D1LZA1|D1LZA1_PANTI polypeptide sequence
MEPWRPSPRNPMDRIDPKTFRFQFPNLRYASGRKLCYLCFQVERDYFYYNDSDWGVFRNEVHPWAPCHAEQCFLSWFRDQYPYRDEDYNVTWFLSWSPCPTCAEEVVEFLEEYRNLTLSIFTSRLYYFWHPNYQEGLCKLWDAGVQLDIMSCDEFEYCWDNFVYHKGMRFQRRNLLKDYDFLAAKLQEILSPGQQRKRDWPFPPRPGAQVDPRSWVQEVTEPGINTRRHPLHLLVSFLLPRPTMNPLQEDIFYRQFGNQHRVPKPYYYRRKTYLCYQLKLPEGTLIDKDCLRNKKKRHAEICFIDKIKSLTRDTSQRFEIICYITWSPCPFCAEELVAFVKDNPHLSLRIFASRLYVHWRWKYQQGLRHLHASGIPVAVMSLPEFEDCWRNFVDHQDRLFQPWRNLDQYSESIKRRLGKILTPLNDLRNDFRNLKLE

SEQ ID NO: 72 - protein, 440 aa, Artificial Sequence
  Description of artificial sequence: pYY-BEM3.3; tr|A0A3Q0DM17|A0A3Q0DM17_TARSY polypeptide sequence
MPMKRMYSNIYFDHFNNQRLLSGQNAPWLCFKVERVENCMLVPLETGVFGNQVSGCCGKTERPVEPTSLTRSVLVSPNPGTELRAQQPSRKGHLGKLGCVEYPSPGLALVMLGYGASTYCPDSSMYCPETCHHPEMCFLYWFEKTLSHEEQYQITWYVSWSPCVNCAEEVAEFLSVHPKVNLTIYAARLYCYQKLNHRQGLRRLCKEGACVKIMNYEEFDHCWENFVYNNYKSFKPWVKLQDNYELLATELDKILRIPMERMPQKKFRFHFQNLIAKDRNTTWLCFEVKNVRKKHPPDLLERGIFQNQVTPRINCHAEMCFLSWFLENMLLHGKRYQVTWYISWSPCSICAEEVAEFLSAHPKVSLTIYAARLYYFWVPGYRQGLRRLVEEGARVEIMNYEEFDYCWENFVSINNEPFQPWEGLHEKYGYLVTKLNNILG

SEQ ID NO: 73 - protein, 453 aa, Artificial Sequence
  Description of artificial sequence: pYY-BEM3.4; tr|A0A3Q0DNJ5|A0A3Q0DNJ5_TARSY polypeptide sequence
MEDNPEPRPRQQMDQDTFIFNFNNDPSVRGRHQTFLCYEVEHLDDDTWVPQDKYLGFLHNQPQSRSNAYCAYHAELCFLELVSSWQLDPAQRYRVTCFISWSPCSSCAQEVAAFLKKNRHVTLRILAARIYDYYQGYEDGLRTLQGVGVDITVMTSAEFGHCWNTFVDHQGSPFQPWEGLDQHSQVIWQRMQDILQVIPAKYLMEKVKYTVTVDILFKGRVPGPRYLMDQNTFTRNFINNLSVSGRRQTLLCYEVERLGGDIWVPLDQLRGFLLSQARDVLNYYQGRHAEPCFLDLVSSWQLDPAQHYRVTWFISWSPCTSCAQAVAAFLRENRHVTLRILAARIYDYHQGYEEGLRTLQRTGAHIDIMTFKEFGHCWNTFVNHKGSPFKSWTGLDQHSQALRKRLQDILHTMASSLWDQSEPKKPIPSQEVTLPESIPPSHGNRFRLVKRPS

SEQ ID NO: 74 - protein, 424 aa, Artificial Sequence
  Description of artificial sequence: pYY-BEM3.5; tr|G5AYU5|G5AYU5_HETGA polypeptide sequence
FCFLSCVHRKPIERIYKKAFRFYFRNLRCAYGRNKTFLCYEVKRERDNKVLHKGVVLNQVEPYMPLHAELRFLSWFHDTLLCPLGSYQVTLYVSWSPCSECAEELTTFLAGHRNVTMTIYVAQLYYCNWKSPNREGLKILIAEDARLRVMFYDEFLYCWRNFVKNDYNNFDPWSLLDENSRYHNRILQNILKGWGRPHRVGPEGEQTATPGGSGGHCISVFSLLRRREMTLKEETFRVQFNNAYKAPKPYRRRVTYLCYQLQEANGDPLTKGCLRTKKGYHAESRFIKRICSMDLGQDQSYQVTCFLTWSPCPHCAQELVSFKRAHPHLRLQIFTARLFFHWKRSYQEGLQRLCRAQVPVAVMGHPEFAYCWDNFVDHQPGPFEPPWAKLEYYSSCLKRRLQQILRSWGVDDLTNDFRNLQLGP

SEQ ID NO: 75 - protein, 385 aa, Artificial Sequence
  Description of artificial sequence: pYY-BEM3.6; tr|A0A2Y9QMV5|A0A2Y9QMV5_TRIMA polypeptide sequence
MLSSPQTPGTRKPMKTLAPDEFSFNFENLRLAHGRNTTFLCFQVETKAPPSLNSPDSGIFQNQDHCPSHHHAEMVFLTWFQKRLSPAQHYEVTWYMSWSPCSRCAVQVAKFLKSNSTVNLSIFVARLYYPRELETKDGLHSLWQAGAQVQIMFFQDFKYCWENFVNNEGKPFQPWKNLDENSKDWDTELKDIHRNTTDLLTEEMFYSQFYNREKKSSIPRKTYLCYQLNEPQPVKRCLHYKKGYHAVTRFIDGIVSMNLDPARSYDITCYFTWSPCNRYARKLVSFIEDYPNLRLKVYTSRLYFHWCWTNMQGLQHLQNSRVTVAVMTFRDFEYCWKNFVDNQGKPFEPWEKLDLYSQSTERRLRRILKPLTPDVLNEDFGNLHL

SEQ ID NO: 76 - protein, 381 aa, Artificial Sequence
  Description of artificial sequence: pYY-BEM3.7; tr|H0XHI0|H0XHI0_OTOGA polypeptide sequence
LSCAFRDPMNRMYPKTFCQNFEKEPCPSNQNSSWLCFEVETKNSAVFFHRGVFRNQPAPPPRAPTSVLLSQGPVKTPCHAEECFLTWIQGVLPPDHHYHVTWYVSRGPCANCANLIVHFLAMHRRVTLTIFAAHLNFFWESDFQQGLLRMDQEGVQLHIMGYEEFEYCWDNFVYNQRKQFVPWNGLNENYEFMVSTLEDILRSPLDRIRQKDFSIHFRNSLWLDDKSTWLCFEVKRTKSPVPLYRGVFRNQSPPKTPCHAEVRFFTWLQDLPPDFCCQFTWYLSWSPCADCADLVANFLAKHRNVSLTIFVARLYYYRDPEMHRGLRRMYQEGANVDIMSVIEFEYCWDNFVYNQGKQFVPWNGLNENYEFLVPRLQEILE

SEQ ID NO: 77 - protein, 337 aa, Artificial Sequence
  Description of artificial sequence: pYY-BEM3.8; tr|A0A3M0K4Y7|A0A3M0K4Y7_HIRRU polypeptide sequence
MYISKKALRRHFDPRVYPRETYLLCELQWEGSRRVWIHWIRNVPDHHAEEYFLEEVFEPRNYGFCNITLYLSWSPCCTCCSKIRDFLKRNPNVKIDIRVARLIYPDYAETRSSLRELNGLQRVSIQVMEAAGLSCIESKNHRISQVERDPKGSSSPTLFTLQDHLKLSNMTESVIQDSVSIQICYQMRILGFQCHIRWKLQPEDFQRNYSPNQIGRVVYLLYEVRWRRGSIWRNWCSNNPEQHAEVNFLENHFHHRPQTPCSITWFLSTSPCGKCSRRILEFLKSQPNVTLEIYAAKLFRHHDIRNRQGLRNLMMNGVTIYIMNLEGNPASLCLSVD

SEQ ID NO: 78 - protein, 237 aa, Artificial Sequence
  Description of artificial sequence: pYY-BEM3.9; tr|A0A3P4LUZ8|A0A3P4LUZ8_GULGU polypeptide sequence
MSFEDYEYCWETFVDHKGMYFQSWDLLRDNDLLAAELKNILRSTMNPLRQEIFYHQFGNQPRAPRPYHRRKTYLCYQLQPHEGPITARVCLQNKKKRHAEIRFIDNIRALRLDRSQTFEITCYLTWSPCPTCAKALAVFVQDHPHISLRLFASRLFIHWCWKYQEGLRLLHRSRIPVAVMRLQEFEDCWRNFVDNQDEPFQPWNKLEQYSESITRRLRRILGHPQNNLENDFRNLHI

SEQ ID NO: 79 - protein, 221 aa, Artificial Sequence
  Description of artificial sequence: pYY-BEM3.10; tr|G5BPM8|G5BPM8_HETGA polypeptide sequence
RRRIEPWQFEASFDPRQLRRETCLLSEVRWGTSPRAWRGCSLNTARHAEVSFMDRLTSEGRLRGPVRCSITWFLSWSPCGACAQAIGEFLRQHPNVSLVIYIARLFWHVDEQNRQGLRDLVTRGVRMQVMSDPEFAHCWRNFVNYSPGQEARWPQVPPVWTWLYSLELHCILLNLPPCLKISRRHHNQLTFFQLILQNCHYQAIPSPVLLASGLIHPFVTW

SEQ ID NO: 80 - protein, 211 aa, Artificial Sequence
  Description of artificial sequence: pYY-BEM3.11; tr|H2M862|H2M862_ORYLA polypeptide sequence
MITKLDSVLLPKKKFIYHYKNMRWARGRHETYLCFVVKRRVGPESLSFDFGHLRNRNGCHVELLFLRHLSALCPGLWGYGATGQGRVSYSITWFCSWSPCANCSFRLAQFLSQTPNLRLRIFVSRLYFCDLEDSREREGLRMLKKVGVHITVMSYKDYFYCWQTFVARKQSKFKPWDGLHQNSVRLSRKLNRILQPCETEDFRDAFKLLGL

SEQ ID NO: 81 - protein, 353 aa, Artificial Sequence
  Description of artificial sequence: pYY-BEM3.12; tr|H0Y0C6|H0Y0C6_OTOGA polypeptide sequence
MYLKTFYRHFNNRPYLSRRNDTWLCFEVKTTSSNSPGSFYSGVFRNQGPRYCPWHTELCFLTWVRPIVSHHHFYQITWYMSWSPCANCAWQVATFLATHENVSLTNYTVRIYYFWRQDYRQGLLRMIEEGTQVYVMSSKEFQHCWENFVDHWGTRWVTCWNRLKKNYEFLVTRLSEILSDPKERISPNTFYNQFNNTPVPRGRKDTWLCFEVKEKNSNSPGSFHRGVFQNQVFSGTSSHARRCPPDHHYEVTWYTSWSPCAHCAWHVVNFLTSNPNVSLTIFAARLYYIYRPEIQQGLRRVFQEGAKVHIMSLKEFKYCWAKLVYNSGMRFMPWYQFNFNFLFPNTTLKGDLH

SEQ ID NO: 82 - protein, 189 aa, Artificial Sequence
  Description of artificial sequence: pYY-BEM3.13; tr|A0A3Q2Z5X6|A0A3Q2Z5X6_HIPCM polypeptide sequence
MDVHFMNFIYHYKNMRWAKGRNETYLCFVVKRRVGPNSLTFDFGHLRNRNGCHVELLFLRYLGRRLSYSITWFCSWSPCANCSAALSQFLSRMPNLRLRIFVARLYFCDMEDSHEREGLRLLQKAGVQVTVMSYKDYYYCWQTFVDRKKSHFKAWEDLHQNSVRLSRKLNRILQPCEMDLRDAFKLLGL

SEQ ID NO: 83 - protein, 190 aa, Artificial Sequence
  Description of artificial sequence: pYY-BEM3.15; tr|A0A2K6NY90|A0A2K6NY90_RHIRO polypeptide sequence
MNPHIRNPMEAMYPGTFYFHFKNLWEADNRNESWLCFAVEVIKHHSTVSWKRGVFRNQVDPETHCHAEKCFLSWFCDNTLSPKKNYQVTWYTSWSPCPECAREVAKFLARHSNVMLTIYTARLYYSQYPNYQEGLRRLNEEGVPVEIMDYEDFKYCWENFVYNGDELFKPWKGLKYNFLFLDSKLQEILE

SEQ ID NO: 84 - protein, 202 aa, Artificial Sequence
  Description of artificial sequence: pYY-BEM3.16; tr|Q6ICH2|Q6ICH2_HUMAN polypeptide sequence
MNPQIRNPMERMYRDTFYDNFENEPILYGRSYTWLCYEVKIKRGRSNLLWDTGVFRGPVLPKRQSNHRQEVDPETHCHAERCFLSWFCDDILSPNTNYEVTWYTSWSPCPECAGEVAEFLARHSNVNLTIFTARLCYFWDTDYQEGLCSLSQEGASVKIMGYKDFVSCWKNFVYSDDEPFKPWKGLQTNFRLLKRRLREILQ

SEQ ID NO: 85 - protein, 202 aa, Artificial Sequence
  Description of artificial sequence: pYY-BEM3.17; tr|G8GPV1|G8GPV1_CERNE polypeptide sequence
MDGSPASRPGHVMDPGTFTSNFNNKPWVSGQRETYLCYKVERSHNDTWVLLNQHRGFLRNQAKNRLHGDYGCHAELCFLGEVPSWRLDPTQTYRVTWFISWSPCFSGGCAEQVRAFLQENTHVRLRIFAARIYDYDFLYQEALRTLRDAGAQVSIMTYEEFKHCWDTFVDHQGRPFQPWDGLDEHSQALSGRLQAILQNQGN

SEQ ID NO: 86 - protein, 181 aa, Artificial Sequence
  Description of artificial sequence: pYY-BEM3.18; tr|Q1WBT6|Q1WBT6_SYMSY polypeptide sequence
MALLTAKTFRLQFNNKRRVTKPYYPRKALLCYQLTPQNGSTPTRGYFKNKKKRHAEIRFINKIKSMGLDETQCYQVTCYLTWSPCPSCAWELVDFIKAHDHLNLGIFASRLYYHWCRHQQEGLRLLCGSQVPVEVMGFPEFADCWENFVDHEEPLSFNPSEMLEELDKNSRAIKRRLEKIK

SEQ ID NO: 87 - protein, 211 aa, Artificial Sequence
  Description of artificial sequence: pYY-BEM3.19; tr|A0A3B4CS14|A0A3B4CS14_PYGNA polypeptide sequence
MDNTNRRKFIYHYKNVRWARGRHETYLCFVVKKRNSPDSLSFDFGHLRNRNGCHVELLFLRYIEVLCPGLWGSGVDGVRVSYAVTWFCSWSPCSNCAQRLTNFLSQTPNLRLRIFVARLYFCDEEDSLEREGLRHLQRAGVQITVMTYKDFFYCWQTFVASRERCFKAWEGLRQNSVRLSRKLNRILQVFISTPVISPLITTHLGQSWAGG

SEQ ID NO: 88 - protein, 315 aa, Artificial Sequence
  Description of artificial sequence: pYY-BEM3.20; tr|A0A087XZI4|A0A087XZI4_POEFO polypeptide sequence
RKVSYSVTWFCSWSPCANCSIRLAQFLHQTPNLRLRIFVSRLYFCDLEDSREREGLRILKKAGVHITVMSYKDYFYCWQTFVAKSQSKFKPWDGLHQNYIRLSRKLNRILQPALDIKKFIYHYKNLRWARGRCETYLCFVVKKKLHLFMFVIVGRNRLFDLNVTMNNKSLYLIPLHLQLLFLRHLGALCPGLWGYGVTGERKVSYSVTWFCSWSPCANCSIRLAQFLHQTPNLRLRIFVSRLYFCDLEDSREREGLRILKKAGVHITVMSYKDYFYCWQTFVAKSQSKFKPWDGLHQNYIRLSRKLNRILQVQFF

SEQ ID NO: 89 - protein, 189 aa, Artificial Sequence
  Description of artificial sequence: pYY-BEM3.21; tr|A0A341AEK4|A0A341AEK4_9CETA polypeptide sequence
MASDRGPSAGDATSRRRIEPWEFEVSFDPRELCKETRLLYEIKWGRSQHVWRHSGKNTTNHVECNFIEKFTSERPFHRSVSCCITWFLSWSPCWECSKAIREFLNQHPRVTLFIYVARLFQHMDPQNRQGLRDLIHSGVTIQIMGPTEYDYCWRNFVNYPPGKEAHWPRYPPPLMKLYALELHCIILVP

SEQ ID NO: 90 - protein, 180 aa, Artificial Sequence
  Description of artificial sequence: pYY-BEM3.22; tr|E2D879|E2D879_MUSMI polypeptide sequence
RNLISRETFNFNFENLCYAKGRKNTFLCYEVTRKDCDSPVSLCHGVFKNKGSIHAEICFLYWFHDKVLKVLTPREEFKVTWYMSWSPCFECAEQVVRFLATHHNLNLTIFSSRLYNVSDPDTQQKLCRLVQEGAQVAVMDLSEFKKCWEKFVDNDGQQFRPWKRLRTNFRYQNSKLQEIL

SEQ ID NO: 91 - protein, 221 aa, Artificial Sequence
  Description of artificial sequence: pYY-BEM3.23; tr|A0A2K5RDN6|A0A2K5RDN6_CEBCA polypeptide sequence
MWEAQSPGLSREWGSVAISPEDPGPLHIGRFLSCAFRHPMNAMYPGIFNFHFRNLRKAYGRNETWLCFTVEGIMNRSTVSWKSGVFRNQVGSDPFCHAEMCFLSWFRHNMLSPKKDYEVTWYASWSPCPECAGQVAEFLARHGNVRLTIFTAHLYYFWNPSFRQGLRRLSQEGASVLIMGYEDFEYCWDNFVYNDGQPFKPWKRLQDNSLSLYITLQEILQ

SEQ ID NO: 92 - protein, 206 aa, Artificial Sequence
  Description of artificial sequence: pYY-BEM3.24; tr|A0A2K5RDN7|A0A2K5RDN7_CEBCA polypeptide sequence
MEASPASRPRPLMGPRTFTENFTNNPEVFGRHQTYLCYEVKCQGPDGTRDLMTEQRDFLCNQARNLLSGFDGRHAERCFLDRVPSWRLDPAQTYRVTCFISWSPCFSCAREVAEFLQENPHVNLRIFAARIYDCRPRYEEGLQMLQNAGAQVSIMTSEEFRHCWDTFVDHQGHPFQPWEGLDEHSQALSRRLQAILQGNRWMILSL

SEQ ID NO: 93 - protein, 184 aa, Artificial Sequence
  Description of artificial sequence: pYY-BEM3.25; tr|A0A1C9CJ69|A0A1C9CJ69_CERAL polypeptide sequence
NPMKAMDPHIFYFHFKNLRKAYGRNETWLCFAVEIIKQRSTVPWRTGVFRNQVDPESHCHAERCFLSWFCEDILSPNTDYRVTWYTSWSPCLDCAGEVAEFLARHSNVELAIFAARLYYFWDTHYQQGLRSLSEKGASVEIMGYEDFKYCRENFVCDDGKPFKPWKGLKTNFRFLKRRLQEILE

SEQ ID NO: 94 - protein, 197 aa, Artificial Sequence
  Description of artificial sequence: pYY-BEM3.26; tr|A0A2R2Z4D2|A0A2R2Z4D2_PTEAL polypeptide sequence
MHLQVWRKVTEAWREGYTLKPWSRNPMERLYHDYFYFHFYNLPTPKHRNGCYICYQVEGTKKHSRMPLLRGVFENQESLDMMLSPGEKYRVTWYISWSPCFACVDEVIKFLREHTNVELIIFAARLYHSDILQYRQGLRKLHDAGVHVAIMSYYEFKHCLNDFVFHQGRSFCPWNDLNKNSKNLSNTLEDILRNQED

SEQ ID NO: 95 - protein, 206 aa, Artificial Sequence
  Description of artificial sequence: pYY-BEM3.27; tr|B7T161|B7T161_SHEEP polypeptide sequence
MTEGWAGSGLPGRGDCVWTPQTRNTMNLLRETLFKQQFGNQPRVPPPYYRRKTYLCYQLKELDDLMLDKGCFRNKKQRHAEIRFIDKINSLNLNPSQSYKIICYITWSPCPNCASELVDFITRNDHLNLQIFASRLYFHWIKPFCRGLHQLQKAGISVAVMTHTEFEDCWEQFVDNQLRPFQPWDKLEQYSASIRRRLQRILTAPT

SEQ ID NO: 96 - protein, 205 aa, Artificial Sequence
  Description of artificial sequence: pYY-BEM3.28; tr|A0A2R2X2G4|A0A2R2X2G4_PTEAL polypeptide sequence
MAGLGQACEGCCGQMPEISYPMGRLDPKTFSFEFKNLPYAYGRKSSYLCFQVEREQHSSPVPSDWGVFKNQFCGTEPYHAELCFLNWFRAEKLSPYEHYDVTWFLSWSPCSTCAEEIAIFLSNHKNVRLNIFVSRIYYFWKPAFRQGLQELDHLGVQLDAMSFDEFKYCWENFVDNQGMPFRCWKKVHQNYKSVLRKLNEILRRR

SEQ ID NO: 97 - protein, 309 aa, Artificial Sequence
  Description of artificial sequence: pYY-BEM3.29; tr|G1Q1M4|G1Q1M4_MYOLU polypeptide sequence
YAELSFLDLFQSWNLDRGRQYRLTWYMSWSPYPDCAQKLVEFLGENSHVTLRIFAADIHSLCSGYEDGLRKLRDARAQLAIMTRDELQYCWVTFVDNQGQPFRPWPNLVEHIKTKKQELKDILGNPMRRMYPKTFNFNFQNLNSYGRKSTFLCFEVETWEDGSVLDYQNGVFQNQLDPGHAELCFIEWFHEKVLFPDEVRCPDAQYHVTWYISWSPCFECAEQVAGFLNEHENVDLSISAARLYLCEDEDEQGLQDLVAAGAKVAMMAPEDFEYCWDNFVYNRGWPFTYWKHVRRNYGRLQEKLDEILW

SEQ ID NO: 98 - protein, 216 aa, Artificial Sequence
  Description of artificial sequence: pYY-BEM3.30; tr|A0A1S3AN78|A0A1S3AN78_ERIEU polypeptide sequence
RRIEPWEFEDFFDPRQFRPETCLLYEVRWGSSRNAWRSTARNTTRHAEVNFLERFAAERHFDKPVSCSITWFLSWSPCWECSQAIGAFLSQHPQVTLAIHVTRLFHHEDEQNRQGLRDLLARGVTLQVMGDSEYAHCWRTFVNSPPGAEGHYPRYPSDFTRLYALELHCIILGLPPCLEILRRYQNQFTLFRLVPQNCHYQMIPHLNFFVVRHYFF

SEQ ID NO: 99 - protein, 201 aa, Artificial Sequence
  Description of artificial sequence: pYY-BEM3.32; tr|Q4VUI3|Q4VUI3_XENLA polypeptide sequence
MTMDSMLLKRNKFIYHYKNLRWARGRHETYLCYIVKRRYSSVSCALDFGYLRNRNGCHAEMLFLRYLSIWVGHDPHRNYRVTWFSSWSPCYDCAKRTLEFLKGHPNFSLRIFSARLYFCEERNAEPEGLRKLQKAGVRLSVMSYKDYFYCWNTFVETRESGFEAWDGLHENSVRLARKLRRILQPPYDMEDLREVFVLLGL

SEQ ID NO: 100 - protein, 191 aa, Artificial Sequence
  Description of artificial sequence: pYY-BEM3.33; tr|E2RL86|E2RL86_CANLF polypeptide sequence
MNPLQEETFYQQFSNQRVPKPTYQRRTYLCYQLKPHEGSVIAKVCLQNQEKRHAEICFIDDIKSRQLDPSQKFEITCYVTWSPCPTCAKKLIAFVNDHPHISLRLFASRLYFHWRQKYKRELRHLQKSGIPLAVMSYLEFKDCWEKFVDHKGRPFQPWNKLKQYSESIGRRLQRILQPLNNLENDFRNLRL

SEQ ID NO: 101 - protein, 226 aa, Artificial Sequence
  Description of artificial sequence: pYY-BEM3.34; tr|G1LWB0|G1LWB0_AILME polypeptide sequence
SSAAPASIHLLDEDTFTENFRNDDWPSRTYLCYKVEGPDQGSGVPLGQDKGILHNKPAQGPEPSRHAECYLLEQIQSWNLDPKLHYGVTCFLSWSPCAKCAQKMARFLQENSHVSLKLFASRLYTRERWDEDYKEGLRTLKRAGASIAIMTYREFEHCWKTFVLHDQEGSCFQPWPFLHKESQKFSEKLQAILQVGVLLLSLPPPLPSSPLSSPWPFPAPLRASTG

SEQ ID NO: 102 - protein, 238 aa, Artificial Sequence
  Description of artificial sequence: pYY-BEM3.35; tr|A0A1U7S7K7|A0A1U7S7K7_ALLSI polypeptide sequence
MGEHWQYAGSGEYIPQDQFEENFDPSVLLAETHLLSELTWGGRPYKHWYENTEHCHAEIHFLENFSSKNRSCTITWYLSWSPCAECSARIADFMQENTNVKLNIHVARLYLHDDEHTRQGLRYLMKMKRVTIQVMTIPDYTYCWNTFLEDDGEDESDDYGGYAGVHEDEDESDDDDYLPTHFAPWIMLYSLELSCILQGFAPCLKIIQGNHMSPTFQLHVQDQEQKRLLEPANPWGAD

SEQ ID NO: 103 - protein, 220 aa, Artificial Sequence
  Description of artificial sequence: pYY-BEM3.36; tr|A0A2R2X2J8|A0A2R2X2J8_PTEVA polypeptide sequence
MPRIGNMNLLSEKTFNYHFGNQLRVKKPQGRRRTYLCYKLKLPNETLVKGYFINKKKNHAEIRFINKIRSLNLDQTQSYKITCYITWSPCSYCAGKLVALVKSCPHLSLQIFTSRLYYHWLWKNQAGLRYLWKINISVLVMKEPEFADCWDNFVNHQSRRFKPWEKLTQYSNSTERRLLRILRINRTDLFLAQSSEQDPGLNDLVDAIKRLFLDAHRPRD

SEQ ID NO: 104 - protein, 198 aa, Artificial Sequence
  Description of artificial sequence: pYY-BEM3.37; tr|A0A151P6M4|A0A151P6M4_ALLMI polypeptide sequence
MAVEEEKGLLGTSQGWKIELKDFQENYMPSTWPKVTHLLYEIRWGKGSKVWRNWCSNTLTQHAEVNCLENAFGKLQFNPPVPCHITWFLSWSPCCQCCRRILQFLRAHSHITLVIKAAQLFKHMDERNRQGLRDLVQSGVHVQVMDLPDYRYCWRTFVSHPHEGEGDFWPWFFPLWITFYTLELQHILLQQHALSYNL

SEQ ID NO: 105 - protein, 158 aa, Artificial Sequence
  Description of artificial sequence: pYY-BEM3.38; tr|A0A2K6MNR2|A0A2K6MNR2_RHIBE polypeptide sequence
IWLCFTMEIIKQCSTVSWKRGVFRNQVDPETHCHAERCFLSWFWEDTLSPNTNYQVTWYTSWSPCLDCAGEVAEFLARHSNVKLAIFAARLYYFWDTDYQQGLRSLSEEGTSVEIMGYEDFKYCWENFVYNGDEPFKPWKGLKYNFLFLDSKLQEILE

SEQ ID NO: 106 - protein, 182 aa, Artificial Sequence
  Description of artificial sequence: pYY-BEM3.40; tr|F1CGT0|F1CGT0_ANOCA polypeptide sequence
KAAILLSNLFFRWQMEPEAFQRNFDPREFPECTLLLYEIHWDNNTSRNWCTNKPGLHAEENFLQIFNEKIDIKQDTPCSITWFLSWSPCYPCSQAIIKFLEAHPNVSLEIKAARLYMHQIDCNKEGLRNLGRNRVSIMNLPDYRHCWTTFVVPRGANEDYWPQDFLPAITNYSRELDSILQD

SEQ ID NO: 107 - protein, 230 aa, Artificial Sequence
  Description of artificial sequence: pYY-BEM3.41; tr|C7AGG3|C7AGG3_HORSE polypeptide sequence
MDPQAPTQRGGLGQAYQGGDYVQAPGNGNTQHLLSEDVFKKQFGNQRRVTKPYYRRKTYVCYQLKLLRGPTIAKGYFRNKKKRHAEIRFIDKINSLGLDQDQSYEITCYVTWSPCATCACKLIKFTRKFPNLSLRIFVSRLYYHWFRQNQQGLRQLWASSIPVVVMGYQEFADCWENFADNRGNPFQSWEKLTEYSKGIKRRLQKILEPLNLNGLEDAMGNLKLGSVDLG

SEQ ID NO: 108 - protein, 197 aa, Artificial Sequence
  Description of artificial sequence: pYY-BEM3.42; tr|A0A250YMK7|A0A250YMK7_CASCN polypeptide sequence
MSLLKEDIFLYQFNNQQQVQKPYFRRRTYLCYQLEQPNGSRPQWPAKGCLQNKKGHHAEIRFIKRIHSMGLEQDQDYQITCYITWSPCLACACALAELKNHFPRLTLRIFASRLYFHWIRKFQMGLQHLYKSGVLVAVMSLPEFTDCWEKFVNHRQVFFTPWDKLEEHSRSIQRRLRRILQSWDVDDLTDDFRNLRL

SEQ ID NO: 109 - protein, 189 aa, Artificial Sequence
  Description of artificial sequence: pYY-BEM3.43; tr|B7T160|B7T160_SHEEP polypeptide sequence
MPWISDHVARLDPETFYFQFHNLLYAYGRNCSYICYRVKTWKHRSPVSFDWGVFHNQVYAGTHCHSERRFLSWFCAKKLRPDECYHITWFMSWSPCMKCAELVAGFLGMYQNVTLSIFTARLYYFQKPQYRKGLLRLSDQGACVDIMSYQEFKYCWKKFVYSQRRPFRPWKKLKRNYQLLAAELEDILG

SEQ ID NO: 110 - protein, 541 aa, Artificial Sequence
  Description of artificial sequence: pYY-BEM4.1; tr|A0A182D0J1|A0A182D0J1_BLAVI polypeptide sequence
MTNPESPPQAPCDFNEDALLNREPLRGSPIKFVSPVDYPDLVFALAGPVGVDIDYIQQSISDCLKSFDYSTEFIRITEIMQDIKCSKTIDCTDMLKEYQSKIEYANELRRAYRAKDLLAALTISAISKLREQIKERDEATNKSNIQPSRRKLAWVVRQLKTPEEVRLLRAVYGKQFVLVSIYSSPQRREDFLISKIKIKSRGTIDNNTSSEGAQRLIERDSKEDNEYGQNLSGTFCLGDIFVDSNNKESAIVSIDRFLNAFFGSNEISPTRDEYGMYLAKTASLRSCDLSRQVGAAIFSKTGEIISLGSNEVPKAGGGTYWTGDNADSRDIRLGHDPNEINKVEIFAEIISRLLEDKLLSNDLLNKDAASIVTILLSKNEGKRYKDLRVMDIIEFGRIIHAEMSAICDAARNGRAIIGATLFCTTFPCHLCAKHIVASGIGRIVYLEPYPKSYAKKLHSDSIQVEDHSDSEKVSFEPFIGISPSRYRELFEGGRRKDPFGEALKWKNDPRKPVIDVVVPPHFEAEKLVIAQLGKLIVSGTG

SEQ ID NO: 111 - protein, 330 aa, Artificial Sequence
  Description of artificial sequence: pYY-BEM4.2; tr|A0A2D6EXD2|A0A2D6EXD2_9ARCH polypeptide sequence
MIIGLVGTIGAGKQTIIDYLQEKYGYNALSCSDVLREILKKQGKPVTRDNLREIGNKTREEGGNGAIAKILLEKLRNNWKANYIVDSLRHPDEVSVLRTSPLFHLVAVDADLRIRFERVKARKREEEPTTLPAFVERDQKEMFGTGNEQRIRETMELADELVLNNGTVEELKQRIDDLNLVSDERLRPSWDDYFMRLARLAAQRSNCMSRKVGAIITKDRRVIATGYNGTPRGVKNCNEGGCERCNSAVAKGTAISECLCLHGEENAIIEAGRVRSEGATIYTSFLPCLWCTKMIIQAGLKEVVFSEVYDLHEASIKLFETSGVLIRRLK

SEQ ID NO: 112 - protein, 367 aa, Artificial Sequence
  Description of artificial sequence: pYY-BEM4.3; tr|F7YVM7|F7YVM7_9THEM polypeptide sequence
MNEFKYMSLALKLAKKGKYTTSPNPMVGAVIVKDGKILATGYHKKAGQPHAEINALSKLNFQAQNCEMYVTLEPCSHYGRTPPCADAIIRSGIRKVVIATLDPNPLVNGKGVEKLKNAGIEVVCGVLEEKAKKLNEKFFKYITTKIPFVALKIAQTLDGKIALKNGESKWITSEKSREYVHKLRMEYDAVLTGIGTILKDDPQLNVRLKKVYKQPLRIILDSKLKIPLSAKVLEDPSKVIILTTALADKEKLEELRSKGVEVIITNEKNGIVDLESALKILGEKKITSVMVEAGPTLLTSFLKESLFDKIYLFIAPKIFGADSKSVFSELGLEDISKSQKFSLESVKKIGEDLLLELYPKQLKKLEE

SEQ ID NO: 113 - protein, 449 aa, Artificial Sequence
  Description of artificial sequence: pYY-BEM4.4; tr|A0A3M6UNF1|A0A3M6UNF1_9CNID polypeptide sequence
MEEKSELENELMRSTSPKPSVPNGSKGNECEQRETRITKENLYMVLALWMEEFPVVEQTSSAKRLNKVGVVFVLPTDRVLAADCSRDGVHGVARVMVNHCGKLEGCKVFVSRKPCSLCAKLLVQSKVSRVFYLPIEPESENKGEIARADNLFKNSSVGQSVFVPCVEQKVLDKLEDKLPKEIITPDDISECRDNLLKKCGWSAEWFARAQASLPWPCFEGKMKSQVDNDFKSLIKWIAVVKAPMDKGVAFPKVKLTSDSRVVPDCDADNFPDSKTAYHMMIFAKMLARQTDDPKTGVGAVIVRGKVPDIVSLGWNGFPSKALYGEFPRASDDDRALQKKFPYVIHAEQNALMVRNVKDLTDGILFVTKPPCDECAPMIKLSGVKTIVIGEKIEKSRGGELSYNLIKEYIKEGIMTCYQMEATKTKAKRLASDPETRKRLKSSCSNSNDV

SEQ ID NO: 114 - protein, 414 aa, Artificial Sequence
  Description of artificial sequence: pYY-BEM4.5; tr|A0A2G3K826|A0A2G3K826_9BURK polypeptide sequence
MTKIIDDVNTAAAAVLDQATAAANQTTFAVGGVMVNNQTGEVISAIHNNVIIPLSNNVSFTFDPTAHGERQLVYWYYANKEALKLPEPNQITVITSLDPCAMCTGALLTAGFNVGVVAIDTYAGINCAQNFQFATLPANLRTKAQKNFGYYASGAANFKPLTRSYVGGPSVAFKNGVVTPANLRDCGTVFTQSVDTVRNTSNSTGLAPSQMSNPAELPSNSAILQAYRAIYKKAFTIKIDNPRLPDAQILTELKAVLADAPNARNAVAFIDPFGNLVLCMADAFNTSPVHAAFMNVTQEYAKTRWDLMNKYAQASTTDNPALYLTHPKYGTFVYLYAPDPDDSITIMSLGAYGSTMEGPIPNMFPSNLQFYYPPRNGAQFSELVPVVNELPPFYTQNVNISLMQVPGVTQAPTK

SEQ ID NO: 115 - protein, 308 aa, Artificial Sequence
  Description of artificial sequence: pYY-BEM4.6; tr|K1ZCJ4|K1ZCJ4_9BACT polypeptide sequence
MSSRAKKNRSTNLKKSIGQKSIENKPTDQKKDQVLVAYVPVIHEGYRRFFRHFPAVKELWLISQELSHELRSLQKDIRALKASETKKLLQTWGQFQKIKLLTPSSLAILQKTTTQLVFPDEEISHHLVEKYFAQNRVLFASFFLRWDKKSSLKKHDLQEYSEISNKEFDQMMIAIAQQEADKSDDWWRQVGGLIFKDETILLLAHNQHTPTEAEAYFAGDPRADFHQGEYLKISTAIHAEAYLIAQAAKQGISLEGADLYVTTFPCPVCAKQVAYSGIKRVFFREGYSLLDGETILKANGVKLIRVTV

SEQ ID NO: 116 - protein, 615 aa, Artificial Sequence
  Description of artificial sequence: pYY-BEM4.7; tr|A0A1G3PNQ8|A0A1G3PNQ8_9SPIR polypeptide sequence
MRDLPLLVLGLTGPMGAGCTRFARDISKMEPGKVIKKQGLLDQVAHEISELSKKASEIRLQCISNGKNSELAELKRLNRRLNAKLAERACLHVIAKSSLPEPLFISLNTIVIKIAVDSITAPEFAEWAKNHAKVADLLKWLRTQWESELTLYETWGQDAGRFSQDELEKMDAMFAEFERIGDEILKEDFETYFGKRNNDFSIRMFSENIRLSGNPFRPAENGGGGGKYDEPSMVMIARETDRYIRFYRTRSDQKRSHFFIIDEIKNPREAEYFRARHQNFFLVSIFSSSEIRASRMRRGLGHDAGVSDADFQHLFRELDSRDWGADDFDAHGLHRQNIYRCFNLADIAINNDVEDERFSEVLFNKFIRYYALMLSPGCVQPTPQETYMHLAYSLSLRSTCISRQVGAVITDLEDRILSLGWNEVPEGQIGCGLKVKKDYTDKENPLFEMEIWDNVITAEDLAVWDDEDSICVKDILSRIEIKTKLKSVSLTPEERADVLKALRIKRLEYSRSLHAEENAILQVASRGGVGLKDGTIYVTTFPCELCSKKIYQVGISKIYYTEPYPNSISEKVILKDGIRNIKILQFEGVKSYSYFKLFKPGFDKKDAQMLEGRGI

SEQ ID NO: 117 - protein, 291 aa, Artificial Sequence
  Description of artificial sequence: pYY-BEM4.8; tr|A0A1G0PGF4|A0A1G0PGF4_9BACT polypeptide sequence
MKHNNQLRKEIEKLLGQNSIIKNDELKKLQKEYKIETDELLISFLPYAAEFAKVPISKYKVGAVVLGKSGNIYFGSNMEFEAGALSATVHAEQSAVNNAWLNGETGINKIAVTAAPCGYCRQFLNELTTAKQLHVLLKDKNLEAAKVFKLTELLPEAFGPRDLEIEGGLMKVENHKLKIENINDELINAALEAANKSYAPYSKNYSGVSIQLSDGTIFSGRYSENAAYNPSLLPFQSALAFMNMNTKKGSNNKIVDAVLVEAVSNISQKDAAGTLLNSISKTKLRYYKIKN

SEQ ID NO: 118 - protein, 398 aa, Artificial Sequence
  Description of artificial sequence: pYY-BEM4.9; tr|A0A0P4WGY5|A0A0P4WGY5_9EUCA polypeptide sequence
MEENSSATSQPKCASRTKQGGNDLSTDMSNLSVGETKRTDFLPWDDYFMAVAFLSAMRSKDPSSQVGACIVNADKKIVGIGYNGMPIGCSDDELPWNKESLDPLQTKYMYVCHAEMNAIMNKNSSDLAGCCVYVALFPCNECAKLVIQAGIREVVFFSDKHQQKPETVASKKMLNMAGVAYRQYTPSQSKIELNLSLKEQEKSEPTADITQSSERDQNSKRKDYLSWEEYFMAMAHLSALRSKDPITQVGACIVNSKKKIVGIGYNGMPLGCNDDLMPWGNSSSNKLETKYMYVCHAGVNAIMNKNSCDVSGCTLYVALFPCNECAKVIIQAGIKTIIYASDTNKDQASILASKKMLDMAGIKYRADNLSQRKIVIDFKTIDWNSRFMNDHQNDPTCL

SEQ ID NO: 119 - protein, 259 aa, Artificial Sequence
  Description of artificial sequence: pYY-BEM4.10; tr|A0A3D8IG27|A0A3D8IG27_9HELI polypeptide sequence
MRKNILYFILTLFFLSGLYATSLPEDNVVSGVIYEKIDTVSAEVDHIYPMLALAIVYKDWQEKNMLNKQGHNIGLVIVDENNMPVFWVRNSVHATHNGTQHGEVRLVSNLLNCEGFNKYLDKYTLYTTLEPCIMCAGMLSMVQIPKVVYAQKDLSCGNTQEIISTAKYPRYYKAFTVENGYKKDLEECFEQYKICKNDSITDFLVNDSAKEIFRKASNDLQDYKVKFKENRRVIKVAQEFLQNIQTKDNLDVLQCPKNM

SEQ ID NO: 120 - protein, 256 aa, Artificial Sequence
  Description of artificial sequence: pYY-BEM4.11; tr|A0A351C8C4|A0A351C8C4_9BACT polypeptide sequence
MNELTKQSEHLRNEALRIATRSYVPYTGQQEGVIILLENGDLIPGVRVENASFQLTIPALQNALSTMYALQRTDISMIVSSIPFTDSDLAYTGGMAEIAWEMVGASLLLVAGAHIPEAGTFIDPARGENLLDVSREAALNAFIPESDFPVGSAIQTSDDVVIDGCNVEHSDWSKIICAERNVLSTARSYGLGQITTIYVSCPKEPGGTPCGACRQVIVELAPDATVWMDRGNQEPIAMKATKLLPGHFTGNVLKKQ

SEQ ID NO: 121 - protein, 301 aa, Artificial Sequence
  Description of artificial sequence: pYY-BEM4.12; tr|A0A1G6V2K7|A0A1G6V2K7_PEPNI polypeptide sequence
MPIVRVNEIGARLPEDWEALETAIWQAYVSREDLPDAGELDLTLVDDATIQELNKTHRQLDKSTDVLSFPMYDDRDDLAADVQAGLPVILGDIMISVPTAERQAQAYGHSFKREMAYLLVHGLLHIAGYDHMSAEEKSAMRRAEEAILADVDVPRDTAPSKTAAVLDEADVQALIDAARAARLQAYAPYSGYAVGAALLAADGRRFCGVNVENASYGATCCAERTALFAAVTAGARDFIALALVTEGDEPAPPCGLCRQALAEFSPDLAIYLAGPTGETYRRTSLAALFPEAFSLSTKESV

SEQ ID NO: 122 - protein, 528 aa, Artificial Sequence
  Description of artificial sequence: pYY-BEM4.13; tr|F2NP91|F2NP91_MARHT polypeptide sequence
MPVMETHALEARFKEALARLCPEGRLLAAVSGGGDSVALLYLLKAAGRDTIVAHLDHALRPDSAADAAFVEKLAQRLGFPLETEHVDVRALAHRKRINLEAAAREVRYAFLARVARRWKARCILTAHTLDDNAETVLLQILRGAGRGLGIRPLQRRVARPLLEFSRAELRAYLEARGARWLEDPTNRSLELDRNYLRHAVLPRITARFPHALEALARFSQAQQADDWALEALSARHLIPDRRWPVPAYRALPLERAPEALRRRAIRGVLEALGVRPEARLVADVEAALGGRAQTLPGGVVVRRQRGTLFFIPPTVRFPKVQPPAGLEARPPRPGDYLVFPYGRKRLVDFLNERGVPRELKRRWPVGAVGAEVRWVYGLWPEPDEDRYMRRALVLARAAARQGEVPIGAVLVRDGAVLAEAANAVEASRDATAHAELLALRTALRRVGEKVLPGATLYVTLEPCPMCYGAILEARVARVVYGVENLKAGAFTVHGLEPRVALEAGRVEGECAKVLKDFFARLRPGRDGA

SEQ ID NO: 123 - protein, 226 aa, Artificial Sequence
  Description of artificial sequence: pYY-BEM4.14; tr|A0A316TX77|A0A316TX77_9BACT polypeptide sequence
MINGYTPYSGNQNTCYVKGESGTFYPGVRIENVSYPLTISSVQAAVCSCLANSDNPVEYYTGDHQPELLQVWADEYDMKPGGKLPDSPLKLFDPLVPSIPDIKKELDVLTEKSVTPNSGFPVSALLQTEKGYIRGVNIELSSWALGLCAERVAISRALTAGYTQFKSIHIYAPEADFVSPCGACRQVLLEVMPDADTELYHGDGTLSKHIVSDLLPFGFTSHKLKK

SEQ ID NO: 124 - protein, 321 aa, Artificial Sequence
  Description of artificial sequence: pYY-BEM4.15; tr|R6VYG3|R6VYG3_9FIRM polypeptide sequence
MIHKGTQTIETKRLILRAFTPDDAEAAFENWMSDPKVTEFLRWKTHADISDSRKIVNEWANGSADPEFYQWAIVPKDVNEPIGTISVVDRNDALGIFHIGYCIGSKWWHKGITSEAFSAVIHFLFEEVGANRIESQHDPENIHSGDVMKKCGLTFEGTLRQADFNNRGIVDACVYSILQSEWQNNTSVWQRLYNAALTVQNDRVVSPFIDAGGVAAALMTKKGNIYTGICIDTASTLGMCAERNAVANMLTNGESRIDKIVAVMPDGKVGAPCGACREYMMQLDRDSGDIEILLDLETEKTVRLKDLIPDWWGAERFGDTE

SEQ ID NO: 125 - protein, 229 aa, Artificial Sequence
  Description of artificial sequence: pYY-BEM4.16; tr|A0A3C1HZ18|A0A3C1HZ18_9BACI polypeptide sequence
MGDIMENWNELSEPWKRCFLQAWKAYCHGSIPIGAVLVDSEGEIFLEGRNRVHELTAPEGQLCDCRIAHAEMNVLVQVKTSDYEKLSGATIYSTMEPCIQCFGAIILSRIKNISFAAIDDKLAGATTLEDRHGFIKSRNLNIAGPFSHLGEIQIILRTDFLLRIFDSEYADPLIAAHEKDYPIGVALGRHYHRNNRLQVAKKETIPFGELFNEFSFDIKRAREGYTLGK

SEQ ID NO: 126 - protein, 205 aa, Artificial Sequence
  Description of artificial sequence: pYY-BEM4.17; tr|A0A1M6KV24|A0A1M6KV24_9BACT polypeptide sequence
MEASQQNILLKIEGKGPVAEINFTVTLPEWLVEQVQSGSTVFLTQKEKMRFVLELARKNVAQETGGPFAAAVFSLESGELVSAGVNVVVESRCSSAHAEVVALSLAQKAVDSHDLGAAGLPRMVLVSSAEPCAMCMGAIPWSGVKQVICGARDEDVRSVGFDEGAKPLEWVEDFAERGIEVIRDVLREEATEVLWDYRERGGEIY

SEQ ID NO: 127 - protein, 207 aa, Artificial Sequence
  Description of artificial sequence: pYY-BEM4.18; tr|A0A2U0T9B4|A0A2U0T9B4_9RHIZ polypeptide sequence
METAELISRLLDVIEKDIAPVTAKGVARGNKLFGAAILKKSDLAVIVAETNNEIENPLWHGEMQAIKRFFELPADQRPATRDCLFLATHEPCSLCLSGITWSGFDNFYYLFSHQDSRDGFAIPYDIQILKSVYAVPEPETGTVSPARDLYNRSNDFWTSHGLQDMIAGLARSNREALLARIDDLNALYAELSERYQRDKGGKGIPLP

SEQ ID NO: 128 - protein, 231 aa, Artificial Sequence
  Description of artificial sequence: pYY-BEM4.19; tr|A0A2K9PN08|A0A2K9PN08_9FLAO polypeptide sequence
MSDKKESKIKISKTSESIELDEIHSLLSYSIVQKFWENDDRNGRGYNVGVILVDENKNIVDWDINSVNKTENSTQHGEMRLISRYLDKDELYSLKGYTMYPTLEPCAMCAGMMTMTNVYRTVNGQMDYFYSKALERLSIDTRECGGYPPYPRTVISEISPSSISTRLDAEYKQYTNAGNKPIITKFLSTYKAKTIYDDAFNQFINFKCKFPENKTKYENAIKFYNSLPESI

SEQ ID NO: 129 - protein, 330 aa, Artificial Sequence
  Description of artificial sequence: pYY-BEM4.20; tr|F4PWM7|F4PWM7_CAVFA polypeptide sequence
MRFSLSLLFVILSVLLAGVLACKDPYNPETVDYGQCASATKANYEVRSDSKVLTPADLPADELAVHESRMRHIIDIARVNNKKFVSSIYFPNGTLACIGINTGKPNMIAHGEIVAIQNCTEIHGISMYTNYSIYTTGEPCSMCASAILWSRFKTVVWSTYNSDLYCKICMSNIPIDSSYIFSRAYGLGIEAPVAIGGVVKAEGDAWFGTYCNRPTSIYYIAPKCACQDPAKVSPLKFTQTRTTVWVEGGDKVVTQWNAIISNPSNSTIVDPPIVISPSVVFKGAPWGISAASEPNTYKLSYNKVLFPGQTFSFGYSVYGLEEVAFTALEA

SEQ ID NO: 130 - protein, 193 aa, Artificial Sequence
  Description of artificial sequence: pYY-BEM4.21; tr|U7QZM1|U7QZM1_PHOTE polypeptide sequence
MNKTRRKLLATLGIMSISMSFIAQAGEKKTQVINNILSKQEITEHEKYMREAIKEAIKNPKHPFGAVIVNRNNGEILSRGVNTGRNNPILHGEIQAINHYITQYGNQGWENVALYTTGEPCSMCMSALVWIGIREVIWATSISVIRNSGIRQIDISAHEIAERASSFYNPITLVGGILANETDKLFLERKRGN

SEQ ID NO: 131 - protein, 319 aa, Artificial Sequence
  Description of artificial sequence: pYY-BEM4.22; tr|A0A081CH48|A0A081CH48_PSEA2 polypeptide sequence
MASRRHLLATQVTGNHRKLSLWHLRGWLSPYTKLVDAVYFLTTNSFYHSLQTPPVQSITMLLSSIITSLALAAQASAYREGLHPEFQSGLSINSVPATDRDHWMRLANSAIYYPPVSHPCPQAPFGTAIVNTTSNELICAIANRVGSTGDPTQHGEITAIQHCTNVMRKKGLSPQEIIAAWKQLSLYTNAEPCTMCLSAIRWAGFKEVIYGTSVGTISENGRNQIYIPSNLVLEKSYSFGHATLMLGNILTHETDPFFQHQFNESAPCPVGCERTQVGEARVKTCEPVPNWQKLVRLEYSEDSRVGSEPVAHTPLHLEL

SEQ ID NO: 132 - protein, 203 aa, Artificial Sequence
  Description of artificial sequence: pYY-BEM4.23; tr|A0A3D3HMU1|A0A3D3HMU1_9GAMM polypeptide sequence
MDYSDAILGAITSIRRNSKQPGVNVTDNVTDSSTQYNNDEYWMRRALALAREAGEAGEIPVGAVLVKDNQQVAGGFNQPIRSHDPAAHAEILTLREAGAVLGNYRLIDTTLYVTLEPCMMCAGALVHSRIKRLVFGAAEPKTGAAGSFIDLLTLPRLNHYMEVTGGVLGEECSVLLSDFFRRRRAEKKALKRQNSESGSDSAS

SEQ ID NO: 133 - protein, 270 aa, Artificial Sequence
  Description of artificial sequence: pYY-BEM4.24; tr|A0A1N5WT13|A0A1N5WT13_9ACTN polypeptide sequence
MLEKIERRLVAAAEAVVRSPSTGDAHTVAAAAMDANGDIYSGVNVFHFTGGPCAELVVIGSAAAANAPPLITIVAVGDGDRGVIAPCGRCRQVMLDLHPDVFVIVPTGDGQLAAKPVRELLPFGYVARTGSTAPRVVYFHPRHYDTISSGLKTATVRFQDSVQTGPAVFVFDDGESIRRLDAVVEKVESRRLDHLTEEDAHHEALPDSDALRDAIKTQYPMLGDGDVVDVATFRLTAISAPDPDPRSSYPPAVSRCNPAGPRADLLVGQS

SEQ ID NO: 134 - protein, 257 aa, Artificial Sequence
  Description of artificial sequence: pYY-BEM4.25; tr|X0SAC5|X0SAC5_9ZZZZ polypeptide sequence
MTKDGRVIASAHDTEVTDQDSTAHAEINAIRKASKIYRKDLTGCLIISTHEPCPMCTGSIIWSNISKVVYGVSIRDSIKAGRDMINLSCKEIIKKPNAEINIYDGILKKECLKLYNNDTRKLVKKFRKYEWINIEENLLNKRMQWFENNKTMIRKLKGNDLEKAYHLILMKIGIKRSEAPIVKKSESKIIFHSKNYCPSLEACIILDLDTREVCKEIYERPTEELIRRLNSKLRFTRNYDCIRPYSDYCEEIIILEK

SEQ ID NO: 135 - protein, 154 aa, Artificial Sequence
  Description of artificial sequence: pYY-BEM4.26; tr|A0A3B8IC10|A0A3B8IC10_9BACT polypeptide sequence
MPSHEDFIHQCLELGKEALLQGNPPVGSVIVWQDQVIGRGIENGRSSGDITQHAELLALQEAVATGQRDKLKEAIIYSTHEPCVMCAYPIRQYKIPTVVYSVAVPELGGHTSSWHLLTTEDVPKWGKAPKIITGISAEEVEALNAAFQDSLKKG

SEQ ID NO: 136 - protein, 180 aa, Artificial Sequence
  Description of artificial sequence: pYY-BEM4.27; tr|A0A2N9P8B9|A0A2N9P8B9_9FLAO polypeptide sequence
MFIFKLISPPVSIEVYQDKIIQKLYICFMENIFTDEYFMKKALQEAETAFQQGEIPVGAVIVIDNRIIARSHNLTEMLNDVTAHAEMQAITASANFLGGKYLKDCTLYVTLEPCQMCAGALYWSQISKIVYGATDEQRGYRAMGAQLHPKTKVISGIMQNECTHLMKDFFKQRRSKSTKD

SEQ ID NO: 137 - protein, 178 aa, Artificial Sequence
  Description of artificial sequence: pYY-BEM4.28; tr|K1KX30|K1KX30_9BACT polypeptide sequence
MVKNPVNNNELYFGKHSEIPMNEEQKAYMKMAVDLSRSGMESGKGGPFGCVIVKDGKVIGIGSNSVLETNDPTAHAEIVAIRDACRNLGHFQLDGCEVYTSCEPCPMCLGAIYWARPSKVFFANDKRDAAEAGFDDDFIYQELELPYEKRKIPFEQGMQDTAKEVFQEWILKEDKTLY

SEQ ID NO: 138 - protein, 196 aa, Artificial Sequence
  Description of artificial sequence: pYY-BEM4.29; tr|R4XI84|R4XI84_TAPDE polypeptide sequence
MSSEIEPPSTDVHKHAVAEAADESGAADAFMQIALQQAETALLNKEVPVGCVFVHQPTGTVLATGANQTNASLNGTLHAEFVAIESILRDHPPSIFRESDLYVTVEPCVMCASALRQLQVRKVYFGCGNDRFGGCGSVFSIHSDASKTGDAAYMVESGIFRKEAIMLLRRFYLLQNESAPKPALKSTRVLKEHFDE

SEQ ID NO: 139 - protein, 212 aa, Artificial Sequence
  Description of artificial sequence: pYY-BEM4.30; tr|A0A239CVF7|A0A239CVF7_9DELT polypeptide sequence
MSPASKKHFPSLFSFLLLTIGLICGTAHAQPQGHTADDTAATLANASLKEHEPFIRRCYQLAIDAGKKGNHPFGALLVHKGKIVLEAENTVLTDNDFTNHAEMNLIAEAARTLSRQIIPEATVYTSCAPCAMCTATLAMAGFTRIVYGVSHDALNKRFGLKGKSVSCPALFKTMGMELEFVGPVLEKEGLRVFDFWPEKDPHAQMLKKQARK

SEQ ID NO: 140 - protein, 320 aa, Artificial Sequence
  Description of artificial sequence: pYY-BEM4.31; tr|A0A1Q3NME1|A0A1Q3NME1_9BACT polypeptide sequence
MTEFNYDWAKLAFSSKRPLTNLKATFIIAPREISEKRFTQLLKEYLPKGDILLGISKEDYVEGLEGQPQFAMLQQKTLQKLIDKVNDASAHKVYTLRYFQRELPAIIEKLTPPRVVGIHGSWHHSFHTLPIYYLLSEKRIPYQLVAAFSDEDEARAYEVATDKKIVRPTLEGSFDDTTVLQLTDEVAKSSYDYGFQTGAILAEKVNGVYQPVAAGFNKVVPYQTYALLNGASRETNFSPANDMNHYDTIHAEMQILVEAAKQGISLKDKTLFVNLMPCPSCARTLSQTELSEIVYRIDHSGGYAVDLLTKVGKDIRRIVY

SEQ ID NO: 141 - protein, 180 aa, Artificial Sequence
  Description of artificial sequence: pYY-BEM4.32; tr|A0A2G6N4N7|A0A2G6N4N7_9DELT polypeptide sequence
MKERTVSYSDRHFMAEALEMAESALTQGEFPVGCVIADGTAVVARGHRTGTTAGAVNEIDHAEINALRHLGLAGEHLDRTDLTIYSTMEPCLMCFAAIVLSGINRIVYAYEDVMGGGTGCDLTGLPPLYRDAPLTLVAGVRRRASLNLFRRFFTDPENGYWAGSLLSRYTLNQTKDSHRL

SEQ ID NO: 142 - protein, 156 aa, Artificial Sequence
  Description of artificial sequence: pYY-BEM4.33; tr|A0A0G0RBB8|A0A0G0RBB8_9BACT polypeptide sequence
MQSVQYNKLTHLQRRALDEAEQVLENSYNPYSHFYVGACLISEDEQLIAGTNFENAAYGSAICAERAAVLRANAMSIRRFRGIAIIARGEDFNTTEVTGPCGSCRQVLYEISQVSGCDLQVILATSKKDKIVITTIRELLPLAFGPLDLGVDIGKY

SEQ ID NO: 143 - protein, 217 aa, Artificial Sequence
  Description of artificial sequence: pYY-BEM4.34; tr|A0A327L2Q5|A0A327L2Q5_9RHIZ polypeptide sequence
MVTSRDGEDEAMMARCVALSRIAVGKGEYPFGAVVAREGRIVAEAINRTIRDGDVSRHAEVIALARAQKAIGRRELRECSLYSNVEPCAMCSYCIREAWVGRVVYALGSPVMGGVSKWNILRDDGLSGRMPQVFDAAPEVVSGVLVEQAQAAWRDWSPLAWEMITLRGLMTDPSARPECRTRAARPRSLWHHLVALIERPPRPYVDPTSAAEGHADL

SEQ ID NO: 144 - protein, 162 aa, Artificial Sequence
  Description of artificial sequence: pYY-BEM4.35; tr|S2DR30|S2DR30_9BACT polypeptide sequence
MKMKKKIEITVSLEVIQKSEWSKEDRSLIERAIHAVEHAHAPYSNFMVGTALLLDNGQIFSANNQENVSFPVGICAERAVLSYAMGNFPNNRPVKLAVVAKRRSDSTWATVTPCGLCRQTINEYEVKFGHPIEILMLNPGEEILKASGIDQLLPFRFNDLNS

SEQ ID NO: 145 - protein, 153 aa, Artificial Sequence
  Description of artificial sequence: pYY-BEM4.36; tr|A0A369QGF1|A0A369QGF1_9BACT polypeptide sequence
MEEHEKWMHWCLNLAQQALQQGDFPVGAVVVQKGKLIGQGVEAGQLKKDITCHAEMEAIRDARQTINTADLQNCILYSTHEPCIMCSYVIRHHKISRVVVGTTVPEVGGSSSAYPLLSAPDISIWVAPPHLVTGVLAEACQALSQAYKQKFKK

SEQ ID NO: 146 - protein, 159 aa, Artificial Sequence
  Description of artificial sequence: pYY-BEM4.37; tr|A0A1W6X4U4|A0A1W6X4U4_9RHIZ polypeptide sequence
MTNPSRQERWDRRFLELAKVFGTWSKDRSAGTGCVIVGPDRLLRASGYNGFARGIDDEVPERHERPAKYSWTEHAERNAIYNAAKLGISLDGCTAYVNWFPCIDCARAIVQAGIVRLVGLHPDHADQRWGSEFKFATEMLRESGIEIILYDIPELAARK

SEQ ID NO: 147 - protein, 490 aa, Artificial Sequence
  Description of artificial sequence: pYY-BEM4.38; tr|A0A238BW09|A0A238BW09_9BILA polypeptide sequence
MEEMARKIRTKAKKANSYCNTMTFLISKASIVLLKAECKRIELTVVIFRFLIKMNASEPNNELCDMTVIKSMLKITHVIFDLDGLLIDTEVVFSKVNQCLLSKYNKKFTPHLRGLVTGMPKKAAVTYILEHEKLSAKVDVDEYCKKYDEMAEEMLPKCSLMPGVMKLVRHLKTHSIPMAICTGATKKEFEIKTRYHKELLDLISLRVLSGDDPAVKRGKPAPDPFLVTMDRFKQKPEKAENVLVFEDAANGVCAAIAAGMNVIMVPDLTYMKIPEGLQNKINSFSDNLIISNDLNVALMSLKKELSEEEVHFLNRAFEIAVDAVLNNEVPVGCVFVFEGQEVAFGRNDVNRTKNPTYHAEMVALKMMKQWCMDNGRDLEEIMRRTTLYVTLEPCIMCASALYHLRLKKILYGAANERFGGLVSVGTREKYGAKHFIEIMPNLSVDRAVKLLKEFYEKQNPFCPEEKRKVKKPKKSGNNNDNSDDAVALNV

SEQ ID NO: 148 - protein, 159 aa, Artificial Sequence
  Description of artificial sequence: pYY-BEM4.39; tr|A0A1J5H6Z0|A0A1J5H6Z0_9BACT polypeptide sequence
MAYQPSEKFMQMAIDKTREGVLSGQTPFGACIVKDGKVVACEHNTVWQDTDITSHGEVHTIRAACKAIGSIDLSGCILYSTCEPCPMCFSAIHWARIDTVVYGAFIADAQDAGFNELTISNEKMKEFGGSPVNFISGFMRDENVALFKLWKEQGANNVY

SEQ ID NO: 149 - protein, 168 aa, Artificial Sequence
  Description of artificial sequence: pYY-BEM4.40; tr|A0A3C2D945|A0A3C2D945_9BACT polypeptide sequence
MKTTEIRIIVHEYQNIDELTENDQYLLHEARRITEFAYAPYSGFHVGAAILLGNGMIVKGNNQENSAYPSGLCAERVALFYANANYPDSEVKTIAISAAKNGILVNDPIKPCGGCRQTLSEAEVRFGSPIRIILDGQDSILVLHGVESLLPLSFSKKDLASPLAATGR

SEQ ID NO: 150 - protein, 214 aa, Artificial Sequence
  Description of artificial sequence: pYY-BEM4.41; tr|A0A1I7EYS3|A0A1I7EYS3_9BURK polypeptide sequence
MKFKLDPSRPPDEDDYYLGVALAVRRKANCTGNRVAAVIVKNKRVIATGYNGVPEDMPNCLDGGCLRCSNPGGQFKSGTRYDLCICVHAEQNALLTAARFGISVEGAHLYTTMQPCFGCAKEILQAKIEKVFYLHPWVPTDVDPVMDAAMKAEYAKIIGKLKVKKLDFDDPVATWAVTTMRQAALASDKNPDKKTPPKTAKKKVAKKKSRTSPR

SEQ ID NO: 151 - protein, 155 aa, Artificial Sequence
  Description of artificial sequence: pYY-BEM4.42; tr|H8GQX8|H8GQX8_METAL polypeptide sequence
MNHEHFMRRAIELARQAPQYPFGAVIVRRDDGQCVGQGFNRSDLNPTYHGEMVAINDCAVRHCAEDWRGFDLYTTAEPCAMCQGAIEWAGIGRVFYGTSIPYLQKLGWWQIDLRAAEVSARAVFRDTLIVGGILETECNALFAAARRGCFGTGSE

SEQ ID NO: 152 - protein, 156 aa, Artificial Sequence
  Description of artificial sequence: pYY-BEM4.43; tr|A0A0S8HZN3|A0A0S8HZN3_9CHLR polypeptide sequence
MDEHDIRFLRASFDVARNARKNGNHPFGALLVDEHGRIVMEAENTVITAKDCTGHAETNLMREASSKYDSDFLANCTIYTSTEPCPMCAGAIFWSNVRRVVYGLSEESLYEIAGRGSEEVLFLSCREIFERGKKLIEVIGPLLEDEAREVHMGFWR

SEQ ID NO: 153 - protein, 193 aa, Artificial Sequence
  Description of artificial sequence: pYY-BEM4.44; tr|E3SF31|E3SF31_9CAUD polypeptide sequence
MKPTTVLQIAYLVSQESKCCSWKVGAVIEKNGRIISTGYNGSPAGGVNCCEHAEEQGWLLNKPKPVLIPGHKSECVRFSQVDRFVLAKAHREAHSAWSKNNEIHAELNAILFAARMGSSIEGATMYVTLSPCPDCAKAISQSGIKKLVYCETYDKNIPGWDDILKNAGIEVFNVPKRSLDKLNWENINEFCGE

SEQ ID NO: 154 - protein, 330 aa, Artificial Sequence
  Description of artificial sequence: pYY-BEM4.45; tr|F8AAC6|F8AAC6_THEID polypeptide sequence
MIRAPWHEYFMLLAKIVALRSGCNSRPSGAVIVKNKRILATGYNGPMPGAWHCTDRGPGYCFRREKGIPDIDKYNFCRATHAEANAIAQAARFGISVEGASLYCTLAPCYVCLKLIASAGIKKVYYEHDYGSRDFERDQFWKEAIKEAGLEKFEQITVSQEVMEQLQEILPYPTSKRRLAPTEFLDEFEDGKKYGVPSIEVLFNKLNYLTRQALKDITFVIEKTTVTEEPEGISFYLSGKMVELSELINTVKKQINADQNFYFLAKHNAIEAKIEILREAENIRLKAFLNECPLESFKRIAESLDYILYQVSNSLSLPTRLELSVNLLRI

SEQ ID NO: 155 - protein, 158 aa, Artificial Sequence
  Description of artificial sequence: pYY-BEM4.46; tr|A0A2H4ZNK4|A0A2H4ZNK4_9EUKA polypeptide sequence
MKKQLSRKIQEEWMSRLLRNAYDAGTYGEVPIAAVILNESGQCIGWGRNCREKDQNPLGHAEIIALRQASYLKKSWRFNECTMLVTLEPCPMCAGALLQARINHIIYGASDYKRGGFGGVLDLSKNSSAHHKIEITRGVKSIQSCQLLETWFRRRRRV

SEQ ID NO: 156 - protein, 176 aa, Artificial Sequence
  Description of artificial sequence: pYY-BEM4.47; tr|A0A239N5N1|A0A239N5N1_9PSED polypeptide sequence
MEGRAGIIPFDEGGAAMGPAEEDSPMQHLAYMREALALARANVEAGGRPFGAVLVRDGEVIARAANGTHLDHDPTAHAELLALRAAGRALGSPRLDGCVVYASGHPCPMCLAAMHLSGVSAAYYAYSNADGEPYGLSTAAVYAQMAQPVEWQSLPLQALRPEDEEGLYGFWRERRP

SEQ ID NO: 157 - protein, 199 aa, Artificial Sequence
  Description of artificial sequence: pYY-BEM4.48; tr|A0A328VTR2|A0A328VTR2_9PSED polypeptide sequence
MHPEHLALLQQAPASTHADDTWARLCCEQALLAVEEGCYAVGALLVDGAGELLCSGRNQVFAPAYASAAHAEMRVLDQLEAEHAQVDRRSLTLYVSLEPCLMCYGRILLAGITRVRYLARDRDGGFALRHGRLPPAWANLASGLSVVQAKADPYWLDLAEHAIGRLQDRQTLRQRVIRAWRGQRTLTDEFSSTKRTHSG

SEQ ID NO: 158 - protein, 402 aa, Artificial Sequence
  Description of artificial sequence: pYY-BEM4.49; tr|A0A103YG48|A0A103YG48_CYNCS polypeptide sequence
YIRELHASSLRRDEHEIQNPKILVIVDRLSSPSLHVSLSLSLSLVIFPPFIPLNQTPTHMENAKVVEAKDGTIAVASAFSGHQEVVQDRDHKFLTRAVEEAYKGVECGDGGPFGAVVVHKDEVVASCHNMVLKHTDPTAHAEVTAIREACKKLNKIELSDCEIYASCEPCPMCFGAIHLSRIKRLIYGAKAEAAIAIGFDDFIADALRGTGFYQKAHLEIKQADGNGAMIAEQVFEKTKAKFAIDHKFLTRAVEEAYKGVECGDGRPFGALVVHKDEVVVSCHNMVLNYTDPTAHAEITAIREACKKLNRIELSDCEMYSSCEPCPMCFGAIQISRIKRLVYGAKAEASIASGIPIGDFISDALKGTGFHEKANFEIKQADGNGAMIAEQVFERTKAMFPKR

SEQ ID NO: 159 - protein, 195 aa, Artificial Sequence
  Description of artificial sequence: pYY-BEM4.50; tr|W5M1M8|W5M1M8_LEPOC polypeptide sequence
NSSTRESRVMAQMEINGGASPPKKPGKGQSAADQDMITGLINKALQAKEFAYCPYSNFRVGAALMTNDGRVFTGCNVENACYNLGVCAERTAILKAVSEGYESFRAIAVSSDLQDQFISPCGACRQVMREFGTGWDVFLTKVDGSYVRMTVDELLPMSFGPDDLKKKKVFSLQNGHEVSTQFYTHSPCEAGENNN

SEQ ID NO: 160 - protein, 134 aa, Artificial Sequence
  Description of artificial sequence: pYY-BEM4.51; tr|A0A3N5YPZ2|A0A3N5YPZ2_9ALTE polypeptide sequence
MSNSETEHIQALVDAAQAAQKQSYSPYSSFQVGAAIFADDGNTYSGCNIENVAYPLGQCAEATAIGMMIMQGAKRIEDIMIASPNDQVCPPCGGCRQKISEFGTAETKIHMVTRSGEVSTVTLGELLPLAFDSL

SEQ ID NO: 161 - protein, 162 aa, Artificial Sequence
  Description of artificial sequence: pYY-BEM4.52; tr|A0A2A9NC86|A0A2A9NC86_9AGAR polypeptide sequence
MTNSTLSNEDRTRLIQGAFQARKKTYSPYSNFPVGAALLTTDGRIIEGANIENASYGGTICAERTAIVKAVSDGYRHFAGIAVTTKMPTRVSPCGICRQVLREFCSLDMPVLLVPGDYPQRNPVDDDGADKPGVITEGGVRETTLGALLPDSFGPENLPPRA

SEQ ID NO: 162 - protein, 163 aa, Artificial Sequence
  Description of artificial sequence: pYY-BEM4.53; tr|A0A2D6RD43|A0A2D6RD43_9GAMM polypeptide sequence
MNIENLITENDETLIRRCIELAGESVKNGDKPFGALLAKDGNIIFESSNNAKTKVPYHAEILTLMDAQDKLNTTDLSDYALYSNCEPCPMCSFMIREYKLDKVVFSVHSPYMGGQSRWNILEDDVLTRFKPYFSKPPNVVGGVLESEGKRIFDKVGLWMFGKE

SEQ ID NO: 163 - protein, 204 aa, Artificial Sequence
  Description of artificial sequence: pYY-BEM4.54; tr|A0A0H3AVL6|A0A0H3AVL6_BRUO2 polypeptide sequence
MHAKGYSQQERRIIPFANRFRFRELCSNKSLHGLRAKFPEQYTKWDPMRKAASITKANSATPMDIALEEAHAAGERGEVPIGAVIVRDGEIIARAGNRTREFNDVTAHAEILTIRQAGEMLGSERLIDCDLYVTLEPCAMCAAAISFARIRRLYYGASDPKGGGIEHGGRFYTQPTCHHAPEIYPGFCEADARKILKDFFREKR

SEQ ID NO: 164 - protein, 165 aa, Artificial Sequence
  Description of artificial sequence: pYY-BEM4.55; tr|A0A242H531|A0A242H531_9ENTE polypeptide sequence
MFIVKNNIEVIQQQAELDAKFMKQALKLAKDASNNGNEPFGAVLVKNDKVILTGENQIHTESDPTYHAELGIIRDFCTSQKITDLSEYTLYTSCEPCCMCAGAMVWSNLDRMVYGLGHDELAEIAGFNIMIGSEEIFSKSPNRPEVAKGVLKEAAVPVYVDYFQR

SEQ ID NO: 165 - protein, 181 aa, Artificial Sequence
  Description of artificial sequence: pYY-BEM4.56; tr|A0A2R6XZE2|A0A2R6XZE2_9BACL polypeptide sequence
MSGRISWHEYFMAQAKLIALRATCTRLMVGAVIVRDRRVIAGGYNGSIAGDEHCIDVGCKVRDGHCIRTIHAEQNALMQCAKFGVSTDGAELYVTHFPCLNCTKLLIQAGIRHIYYEVPYRVDPYAIELLEKAGVGTTQITVDLNAYVQVMSKVSTDPALTYVPESKAQKDEYGQSVGKIV

SEQ ID NO: 166 - protein, 173 aa, Artificial Sequence
  Description of artificial sequence: pYY-BEM4.57; tr|A0A139SHT6|A0A139SHT6_9BACT polypeptide sequence
MSEANASSESLPSRNSPVELIAEAAGKFGRRPTWDEYFMATAVLISTRSSCERLNVGCVIVTAGESHKNRIVAAGYNGHLPGSPHTSRMRDGHEQATVHAEQNAISDAARRGSSVEGCTAYVTHYPCINCAKILASAGIAKICYRLDYHNDPLVKPMLAEAGIEIVQLGEAAS

SEQ ID NO: 167 - protein, 170 aa, Artificial Sequence
  Description of artificial sequence: pYY-BEM4.58; tr|A0A261DBH2|A0A261DBH2_9RICK polypeptide sequence
MVMKKKLITVKRSTEFNNFFMEEALKQAQFALDKNEIPVGAIIVNRITNKVIAKAHNIVEQTKNPVLHAEIVAINQSCQILSSKNLSDCDMYVTLEPCVMCSGAISFARIGRLFYAANDPKQGAIENGGRFFNSKSCFYRPEIYSGFSAKISENLIKEFFYNVRYQKCNP

SEQ ID NO: 168 - protein, 146 aa, Artificial Sequence
  Description of artificial sequence: pYY-BEM4.59; tr|A0A2N0XZK6|A0A2N0XZK6_9VIBR polypeptide sequence
MTDNSLHESYMRQAFELSKSALPGCRPNPPVGCVFVKDGEVVSSGFSQPPGNHHAEAGAIAAYTGSYDGLVAYVTLEPCSFQGRTPSCAKALVRVRPEKVYVAILDPDTRNSGAGIKILEDAGIDVEVGLLGEEVASFLNPYLIRN

SEQ ID NO: 169 - protein, 159 aa, Artificial Sequence
  Description of artificial sequence: pYY-BEM4.60; tr|A0A1V5R0F9|A0A1V5R0F9_9BACT polypeptide sequence
MTKKETTKLHALDDFCMKKALLLAKRAFRADEVPVGALVVDSSNKVIGRGYNQVEKRKSQRAHAEQLAIEQACKKIGDWRLEGCTLYVTLEPCTMCMGLIKLSRIERVVFGAASPLFGYQLDKNRKSQLYKKGVIKIRKGVGKATAAALLKDFFKNKRM

SEQ ID NO: 170 - protein, 167 aa, Artificial Sequence
  Description of artificial sequence: pYY-BEM4.61; tr|A0A2W0H8Y3|A0A2W0H8Y3_9BACI polypeptide sequence
MKNNGRLDHEYFMTEALQEAKEAGQRGDLPIGAVIVHNGRIIARGSNMRKTAGIKISHAENNAMHNCAPYLMKHASECVIYTTLEPCIMCLTTLVMANIDSIVFAADDKYMNMKPFIDANSYIRDRIHQYKGGVCRGESEALLRKYSPYAAELALNGTHPHHRKGGA

SEQ ID NO: 171 - protein, 165 aa, Artificial Sequence
  Description of artificial sequence: pYY-BEM4.62; tr|A0A261BDB7|A0A261BDB7_CAERE polypeptide sequence
LYKLYIFRMTTTKANLTQFEQELVDKAVGAMEKAYCKYSGFKVGAALVCEDGEIIIGANHENASYGATICAERSAMVTALTKGHRKFKLLAVATELEAPCSPCGICRQYLIEFGDYKVILGSSTSDQIIETTTYGLLPYAFTPKSLDDHEKEAEERNHQEGEKKH

SEQ ID NO: 172 - protein, 162 aa, Artificial Sequence
  Description of artificial sequence: pYY-BEM4.63; tr|A0A2E1PHI6|A0A2E1PHI6_9GAMM polypeptide sequence
MKELLIHSWLMLNSNSKLIMERVIELSEINLKNGKIPIAAVIVDKKNYEIISESQNEDSPIGHAELLAITKALKKLNTNRLDSTNLFVTIEPCPMCAYAISKCHINRLYFGSEDEKGGGVINGPRIFESHNLKKIDYVSHCYHEKTTQLMQSFFQLKRNQQL

SEQ ID NO: 173 - protein, 133 aa, Artificial Sequence
  Description of artificial sequence: pYY-BEM4.64; tr|A0A378LUA7|A0A378LUA7_9GAMM polypeptide sequence
MDTIIKKMISNAHNTLAHSYSPYSKFSVASCICTDKDNFYTGVNVENSAYGLAICAETSAISAMVTAGEKRIKSMVVMAGTNILCSPCGACRQRIYEFSTPDTLIHLCDKNSILRTFKINELLPEAFKFDFNP

SEQ ID NO: 174 - protein, 370 aa, Artificial Sequence
  Description of artificial sequence: pYY-BEM4.65; tr|A0A139HQ78|A0A139HQ78_9PEZI polypeptide sequence
MADSLKSKPGHARHDTALIHGLSQSDVQKLSESCVDAKSKAYCPYSHFRVGCAVLLANGDVVQGANVENAAYPVGTCAERVALGTAVGAKKGDFRALAVSTDISPPASPCGMCRQFIREFCELNTPILMYDKDGKSVVMTLEQLLPMSFGPDKLLPPGQLENGLMQTQTQSSFVTRAFSTTSSRRQDDTPQVPQSHYDFFPQTFPQGPPPKTSFSPDLKQLRKEFLQLQAKAHPDLAPQDQKRRAEALSMRINEAYKTLQSPLRRAQYLLSQQGIDVEDETAKLDDSSLLMEVMEAREAVEEVEDEEQLNEIRAENNGRIEESVRVLEDAFRDNEFEKAAQEAIRLRYWVNIEESIQGWEKGNGGGILHH

SEQ ID NO: 175 - protein, 165 aa, Artificial Sequence
  Description of artificial sequence: pYY-BEM4.66; tr|A0A2A9FXV0|A0A2A9FXV0_9VIBR polypeptide sequence
MCNLKENKDMDKYFHFACDATIEGMREGTGGPFGATLTRNGEVVCSVANTVLKDMDISGHAEMVAVREACKKLDTLDLSDCVMYATCEPCPMCVSVMLWAGIKTCYYASTHLDAAKHGFSDQQLRDYLDGSDTSTLNMVHIEDNRDDCAKIWTEFRHLNETKNDG

SEQ ID NO: 176 - protein, 509 aa, Artificial Sequence
  Description of artificial sequence: pYY-BEM4.67; tr|A0A1A8AG96|A0A1A8AG96_NOTFU polypeptide sequence
MEHSDRWSRAEPGLSTSSRETRDGSTQTDCKLQGHGPRLSKVNLFTLLSLWMELFPQEQDEENGQSQIRRSGLVVVREGKVVGLHCSGADLHAGQAAILQHGASLANCQLFFSRRPCATCLKMIINAGVRQITFWPGDPEISMLTSNQTHSQRTSQSITEASLDATAVEKLKSNSRPQICVLMQPLAPGVLQFVDETSRRSDFMERMMDDDPELDSEKLFNSDRLRHLKDFCRHFLIQTDQRHKDILSQMGLKNFCVEPYFSNLRSNMTELVEVLAAVAAGMPQQHYGFYREESLSLDPHPVDVSQAVARHCIVQARLLSYRTEDPKVGVGAVIWAKGQSACCCGTGRLYLIGCGYNAYPAGSKYAEYPQMDNKQEDRERRKYRYIVHAEQNALTFRTRDIKPDECSMLFVTKCPCDECIPLIRGAGVKHIYTSDQDRDKDKGDISYLRFGSLKGVCKFIWQRSPPVSSASSLHLTNGCVGKHVRQAEQQIYKNKKLCTKGSSGSSDIC

SEQ ID NO: 177 - protein, 148 aa, Artificial Sequence
  Description of artificial sequence: pYY-BEM4.68; tr|A0A3E2VN88|A0A3E2VN88_9FIRM polypeptide sequence
MEKEITNMDKQKLIQMAVDGLGRSYAPYSHFHVSAALLCADGTVYTGNNIENAAYTPSVCAERCAIFKAVGDGRREFEAIAVCGGPDGVIEDYCPPCGVCRQVMREFCDPSSFRVLVAKTAEDYREYTLEQLLPDGFGPDHLTGSGER

SEQ ID NO: 178 - protein, 221 aa, Artificial Sequence
  Description of artificial sequence: pYY-BEM4.69; tr|A0A2D5ZRJ2|A0A2D5ZRJ2_9BACT polypeptide sequence
MARPVHLHTGERRTEEGATESRAVAAVATAITRAPRAPPRPATGRERDGPPPRRVFGGGLRVGDPSGYDRGESKPIGGPLTEKRSDWHSYFMRIAGEVATRATCDRKHVGAVIVRNRTILSTGYNGSIRGMPHCDDVGHDMVDGHCIATIHAEANAILQAARNGVMIQDGSIYITASPCWNCFKLVANAGLKRVYYGEFYRDKRSFEVARRLGIDLMHIEV

SEQ ID NO: 179 - protein, 155 aa, Artificial Sequence
  Description of artificial sequence: pYY-BEM4.70; tr|A0A1B8WPS3|A0A1B8WPS3_9BACI polypeptide sequence
MEGVQLIYQFQWGNLIMTVNKEDLYLIDVARNTIKTLYVDGKHHVGAAVRTKTGKIYSAVHLEANIGRVSVCAEAIALGKAISEGESEFDTIVAVRHPDPTQENQKIEVVSPCGICRELISDYGKGTNVILKNKEGYIKTVISDLLPNKYIREDN

SEQ ID NO: 180 - protein, 156 aa, Artificial Sequence
  Description of artificial sequence: pYY-BEM4.71; tr|A0A1W5ZQK9|A0A1W5ZQK9_9BACI polypeptide sequence
MNRFMERAVSLAAENVRVGGQPFGAVLVKDDELVAEGVNEMHLNYDVSGHAELLAIRRAQGELQTHDLSGYTMYASGEPCPMCLSAMYFAGIKDVFYCATVEEAAQVGLEKSKNVYDDLQKSKGERSLVMKQMPLEDDQEDPMKLWDERTNHNGTS

SEQ ID NO: 181 - protein, 340 aa, Artificial Sequence
  Description of artificial sequence: pYY-BEM4.72; tr|A0A378V0W4|A0A378V0W4_MYCFO polypeptide sequence
MVHAQFDPTARQALAATAVEAKTRKDLTWQQIADAAELSPAFVTAAVLGQHALPARSAEAVAALLGLDDDAALLLQTIPIRGSIPGGIPTDPTIYRFYEMLQVYGTTLKALVHEQFGDGIISAINFKLDVRKVADPEGGERAVITLDGKYLPPNPFDRVRYRGGLMDFAQRTIDIARQNVAEGGRPFATVIVKNGEILAESPNLVAQTHDPTAHAEILAIRKACTRIGTEHLIGATIYVLAQPCPMCLGSLYYCSPDEVVFLTTRDAYEPHYVDDRKYFELNMFYDEFAKPWDQRRLPMRYEPRDAAVDVYKLWQERNGGERRVPGAPTSTRPGKNPRGE

SEQ ID NO: 182 - protein, 157 aa, Artificial Sequence
  Description of artificial sequence: pYY-BEM4.73; tr|I3XF03|I3XF03_RHIFR polypeptide sequence
MKQRCMSPKSAQRFWDNDMHNNKDRPMSENELFVAAREAMAKAHAPYSKFPVGAAIRAEDGQIYTGANIENLSFPEGWCAETTAISHMVMAGQRKIMEVAVIAEKLALCPPCGGCRQRLAEFSGASTRIYLCDETGIKKSLALSDLLPHSFETEILG

SEQ ID NO: 183 - protein, 595 aa, Artificial Sequence
  Description of artificial sequence: pYY-BEM4.74; tr|F8IEF3|F8IEF3_ALIAT polypeptide sequence
MDAKELETRGWLCMRAVDVIDKKRRGEALAEEELRFLIEGYVAGRIPDYQMSAFLMAVVWRGMTREETLVLTRLLADSGERLDLSGIPGVKVDKHSTGGVGDKATLVVLPLVASIGVPVIKMSGRGLGHTGGTIDKLESIPGFRTDLSVAELVAQVRQVGIALGGQTADLAPADKKLYALRDVTGTVESLPLIASSVMSKKLAGGADAIVLDVKVGDGAFMKSRSDARRLARLMVEIGEAAGRRTVAVLSNMDQPLGCAIGNALEVAEAIRVLSGEGPFDLAEIALALAEEMTVLAGVAATREEARRMLRQSVAEGRALETLRRWIAAQGGDPAVVDDPSRLPQAPVQMPYLPKKAGFVAKLSALAFGLAAMRLGAGRETKEEAIDPSVGIVLHAKVGDRVQTHRPMFTVHARTGEDALRCIQELEAAIQISDDPVEAPPLILARIDRSEALPYADLMDAAREARDRAYVPYSGFAVGAALELADGRMVTGANVENASYGLTNCAERSAVFRAVAEGGPGTKPEIRAVAVIADSPEPVSPCGACRQVLAEFCSPDTPVYLGNLQGDVRETTVGALLPGAFTDAQMANVRRQDKEA

SEQ ID NO: 184 - protein, 153 aa, Artificial Sequence
  Description of artificial sequence: pYY-BEM4.75; tr|A0A1G3M638|A0A1G3M638_9SPIR polypeptide sequence
MKTTNINALDKWDLRFLQMAEHVAEWSKDPSTKVGAVIVRPDRTIASVGFNGFARGVRDTVERLWNRELKYPLTVHAELNAILSAHEPVRGHSLYVSPLSPCSNCAGVIIQSGIARVVAKCGQVNNPAQWSESFNLALTAFAEAGVSVILVEH

SEQ ID NO: 185 - protein, 177 aa, Artificial Sequence
  Description of artificial sequence: pYY-BEM4.76; tr|A0A3D9LFR2|A0A3D9LFR2_9MICC polypeptide sequence
MEQNDHGSSGAFSDPFEDDIPLTASLPRITGTGSGIDWQRLESTARAAMTRAYVPYSRFPVGAAALVEDGRVVAGCNIENASLGLTLCAECSLVSNLQMSGGGRIVAFYCVDGNGEVLMPCGRCRQLLYEFHAPGMRLMGPDGELTMDEVLPLAFGPADMTHLSDSAASTDDPGRTR

SEQ ID NO: 186 - protein, 172 aa, Artificial Sequence
  Description of artificial sequence: pYY-BEM4.77; tr|A0A3B9YGB5|A0A3B9YGB5_9BACT polypeptide sequence
MAKPISKKYRKLIETAKAARKKAYSPYSRYQVGAAVLTESGRIYSGANMENASYGLCMCAERVAIANAVTRGEKVLQAVCVVGKKARPCGACRQVMLEFSTKETELLMVDIDPNARRDTVIRTRVYSMLPNPFDPFESGMLPQHPQNLLRRRKSPQPRRKRRSRPVHREVSR

SEQ ID NO: 187 - protein, 391 aa, Artificial Sequence
  Description of artificial sequence: pYY-BEM4.78; tr|A0A182F569|A0A182F569_ANOAL polypeptide sequence
MPRPSQFRVSSSQSLSNSQIQASQSSDSVVDITSYVNAVVKALLNLSCTKTIIKRADLVNIALKGNGRLIGRVLQDANIELKEIYGYELIEVEKSKTMILCSTLAAGSMDELNDANRRRYTFLYLILGYIFMKNGSVPETIVWEFLETLGIEEQQEHNYFGDVRKLYDSLFKQAYLTRTKQALEGLNDDVMLISWGVRSKHEVSKKDILAGFCKVMNRDPVDFKAQYIEANEKDDKMNNNINGTVDGRNTVEYSSLDASVKELIEAAIKVRNNAYCPYSNFAVGAALRTVGGDIVTGCNVENGTFGPSVCAERTAVCKAVSEGHREFTAVAVVAFQETEFTAPCGTCRQTLSEFSRKDIPIYLVKPSPVRVMVTSLFQLLPHAFSPSFLNK

SEQ ID NO: 188 - protein, 151 aa, Artificial Sequence
  Description of artificial sequence: pYY-BEM4.79; tr|A0A264Z0D4|A0A264Z0D4_9BACI polypeptide sequence
MEPKKLIEEAIVASKQAYVQYSNFHVGAALLTKDGKLYHGCNIENASYGLTNCAERTAIFKAVSEGEKEFQAIAVVGDTEGPISPCGACRQVLAEFFSPDTVVILANLKGDHVVTNINELLPGFFSSKDLQKKVKNCFEKNALGSSCLRPI

SEQ ID NO: 189 - protein, 229 aa, Artificial Sequence
  Description of artificial sequence: pYY-BEM4.80; tr|A0A1L9Q1R3|A0A1L9Q1R3_ASPVE polypeptide sequence
MPLSAEEAALVETATATINSIPLSEDYSVASAAKASDGRVFTGVNVYHFTGGPCAELVVLGVAAAAGAAQLTHIVAVANEQRGILSPCGRCRQVLLDLQPNIQVIVGKEGSEQSVPVAQLLPFSYRQPDQHTPVIFKALTSSGPVVVDFFATWCGPCKAVAPVVGKLSETYTDVRFIQVDVDKARSISQEHDIRAMPTFVLYKDGKLLDKRVVGGNMKELEEQIKAIIA

SEQ ID NO: 190 - protein, 18 aa, Artificial Sequence
  Description of artificial sequence: synthetic peptide
KRTADGSEFESPKKKRKV

SEQ ID NO: 191 - protein, 16 aa, Artificial Sequence
  Description of artificial sequence: synthetic peptide
KRPAATKKAGQAKKKK

SEQ ID NO: 192 - protein, 17 aa, Artificial Sequence
  Description of artificial sequence: synthetic peptide
KKTELQTTNAENKTKKL

SEQ ID NO: 193 - protein, 19 aa, Artificial Sequence
  Description of artificial sequence: synthetic peptide
KRGINDRNFWRGENGRKTR

SEQ ID NO: 194 - protein, 16 aa, Artificial Sequence
  Description of artificial sequence: synthetic peptide
RKSGKIAAIVVKRPRK

SEQ ID NO: 195 - protein, 7 aa, Artificial Sequence
  Description of artificial sequence: synthetic peptide
PKKKRKV

SEQ ID NO: 196 - protein, 30 aa, Artificial Sequence
  Description of artificial sequence: synthetic polypeptide
MDSLLMNRRKFLYQFKNVRWAKGRRETYLC

SEQ ID NO: 197 - protein, 1368 aa, Streptococcus pyogenes [sequence omitted]

SEQ ID NO: 198 - DNA, 4104 bp, Streptococcus pyogenes
  misc_feature (1)..(4104): wild type spCas9 polynucleotide sequence
atggataagaaatactcaataggcttagatatcggcacaaatagcgtcggatgggcggtgatcactgatgattataaggttccgtctaaaaagttcaaggttctgggaaatacagaccgccacagtatcaaaaaaaatcttataggggctcttttatttggcagtggagagacagcggaagcgactcgtctcaaacggacagctcgtagaaggtatacacgtcggaagaatcgtatttgttatctacaggagattttttcaaatgagatggcgaaagtagatgatagtttctttcatcgacttgaagagtcttttttggtggaagaagacaagaagcatgaacgtcatcctatttttggaaatatagtagatgaagttgcttatcatgagaaatatccaactatctatcatctgcgaaaaaaattggcagattctactgataaagcggatttgcgcttaatctatttggccttagcgcatatgattaagtttcgtggtcattttttgattgagggagatttaaatcctgataatagtgatgtggacaaactatttatccagttggtacaaatctacaatcaattatttgaagaaaaccctattaacgcaagtagagtagatgctaaagcgattctttctgcacgattgagtaaatcaagacgattagaaaatctcattgctcagctccccggtgagaagagaaatggcttgtttgggaatctcattgctttgtcattgggattgacccctaattttaaatcaaattttgatttggcagaagatgctaaattacagctttcaaaagatacttacgatgatgatttagataatttattggcgcaaattggagatcaatatgctgatttgtttttggcagctaagaatttatcagatgctattttactttcagatatcctaagagtaaatagtgaaataactaaggctcccctatcagcttcaatgattaagcgctacgatgaacatcatcaagacttgactcttttaaaagctttagttcgacaacaacttccagaaaagtataaagaaatcttttttgatcaatcaaaaaacggatatgcaggttatattgatgggggagctagccaagaagaattttataaatttatcaaaccaattttagaaaaaatggatggtactgaggaattattggtgaaactaaatcgtgaagatttgctgcgcaagcaacggacctttgacaacggctctattccccatcaaattcacttgggtgagctgcatgctattttgagaagacaagaagacttttatccatttttaaaagacaatcgtgagaagattgaaaaaatcttgacttttcgaattccttattatgttggtccattggcgcgtggcaatagtcgttttgcatggatgactcggaagtctgaagaaacaattaccccatggaattttgaagaagttgtcgataaaggtgcttcagctcaatcatttattgaacgcatgacaaactttgataaaaatcttccaaatgaaaaagtactaccaaaacatagtttgctttatgagtattttacggtttataacgaattgacaaaggtcaaatatgttactgagggaatgcgaaaaccagcatttctttcaggtgaacagaagaaagccattgttgatttactcttcaaaacaaatcgaaaagtaaccgttaagcaattaaaagaagattatttcaaaaaaatagaatgttttgatagtgttgaaatttcaggagttgaagatagatttaatgcttcattaggcgcctaccatgatttgctaaaaattattaaagataaagattttttggataatgaagaaaatgaagatatcttagaggatattgttttaacattgaccttatttgaagatagggggatgattgaggaaagacttaaaacatatgctcacctctttgatgataaggtgatgaaacagcttaaacgtcgccgttatactggttggggacgtttgtctcgaaaattgattaatggtattagggataagcaatctggcaaaacaatattagattttttgaaatcagatggttttgccaatcgcaattttatgcagctgatccatgatgatagtttgacatttaaagaagatattcaaaaagcacaggtgtctggacaaggccatagtttacatgaacagattgctaacttagctggcagtcctgctattaaaaaaggtattttacagactgtaaaaattgttgatgaactggtcaaagtaatggggcataagccagaaaatatcgttattgaaatggcacgtgaaaatcagacaactcaaaagggccagaaaaattcgcgagagcgtatgaaacgaatcgaagaaggtatcaaagaattaggaagtcagattcttaaagagcatcctgttgaaaatactcaattgcaaaatgaaaagctctatctctattatctacaaaatggaagagacatgtatgtggaccaagaattagatattaatcgtttaagtgattatgatgtcgatcacattgttccacaaagtttcattaaagacgattcaatagacaataaggtactaacgcgttctgataaaaatcgtggtaaatcggataacgttccaagtgaagaagtagtcaaaaagatgaaaaactattggagacaacttctaaacgccaagttaatcactcaacgtaagtttgataatttaacgaaagctgaacgtggaggtttgagtgaacttgataaagctggttttatcaaacgccaattggttgaaactcgccaaatcactaagcatgtggcacaaattttggatagtcgcatgaatactaaatacgatgaaaatgataaacttattcgagaggttaaagtgattaccttaaaatctaaattagtttctgacttccgaaaagatttccaattctataaagtacgtgagattaacaattaccatcatgcccatgatgcgtatctaaatgccgtcgttggaactgctttgattaagaaatatccaaaacttgaatcggagtttgtctatggtgattataaagtttatgatgttcgtaaaatgattgctaagtctgagcaagaaataggcaaagcaaccgcaaaatatttcttttactctaatatcatgaacttcttcaaaacagaaattacacttgcaaatggagagattcgcaaacgccctctaatcgaaactaatggggaaactggagaaattgtctgggataaagggcgagattttgccacagtgcgcaaagtattgtccatgccccaagtcaatattgtcaagaaaacagaagtacagacaggcggattctccaaggagtcaattttaccaaaaagaaattcggacaagcttattgctcgtaaaaaagactgggatccaaaaaaatatggtggttttgatagtccaacggtagcttattcagtcctagtggttgctaaggtggaaaaagggaaatcgaagaagttaaaatccgttaaagagttactagggatcacaattatggaaagaagttcctttgaaaaaaatccgattgactttttagaagctaaaggatataaggaagttaaaaaagacttaatcattaaactacctaaatatagtctttttgagttagaaaacggtcgtaaacggatgctggctagtgccggagaattacaaaaaggaaatgagctggctctgccaagcaaatatgtgaattttttatatttagctagtcattatgaaaagttgaagggtagtccagaagataacgaacaaaaacaattgtttgtggagcagcataagcattatttagatgagattattgagcaaatcagtgaattttctaagcgtgttattttagcagatgccaatttagataaagttcttagtgcatataacaaacatagagacaaaccaatacgtgaacaagcagaaaatattattcatttatttacgttgacgaatcttggagctcccgctgcttttaaatattttgatacaacaattgatcgtaaacgatatacgtctacaaaagaagttttagatgccactcttatccatcaatccatcactggtctttatgaaacacgcattgatttgagtcagctaggaggtgactga

SEQ ID NO: 199 - protein, 1367 aa, Streptococcus pyogenes
  MISC_FEATURE (1)..(1367): spCas9 polypeptide sequence
MDKKYSIGLDIGTNSVGWAVITDDYKVPSKKFKVLGNTDRHSIKKNLIGALLFGSGETAEATRLKRTARRRYTRRKNRICYLQEIFSNEMAKVDDSFFHRLEESFLVEEDKKHERHPIFGNIVDEVAYHEKYPTIYHLRKKLADSTDKADLRLIYLALAHMIKFRGHFLIEGDLNPDNSDVDKLFIQLVQIYNQLFEENPINASRVDAKAILSARLSKSRRLENLIAQLPGEKRNGLFGNLIALSLGLTPNFKSNFDLAEDAKLQLSKDTYDDDLDNLLAQIGDQYADLFLAAKNLSDAILLSDILRVNSEITKAPLSASMIKRYDEHHQDLTLLKALVRQQLPEKYKEIFFDQSKNGYAGYIDGGASQEEFYKFIKPILEKMDGTEELLVKLNREDLLRKQRTFDNGSIPHQIHLGELHAILRRQEDFYPFLKDNREKIEKILTFRIPYYVGPLARGNSRFAWMTRKSEETITPWNFEEVVDKGASAQSFIERMTNFDKNLPNEKVLPKHSLLYEYFTVYNELTKVKYVTEGMRKPAFLSGEQKKAIVDLLFKTNRKVTVKQLKEDYFKKIECFDSVEISGVEDRFNASLGAYHDLLKIIKDKDFLDNEENEDILEDIVLTLTLFEDRGMIEERLKTYAHLFDDKVMKQLKRRRYTGWGRLSRKLINGIRDKQSGKTILDFLKSDGFANRNFMQLIHDDSLTFKEDIQKAQVSGQGHSLHEQIANLAGSPAIKKGILQTVKIVDELVKVMGHKPENIVIEMARENQTTQKGQKNSRERMKRIEEGIKELGSQILKEHPVENTQLQNEKLYLYYLQNGRDMYVDQELDINRLSDYDVDHIVPQSFIKDDSIDNKVLTRSDKNRGKSDNVPSEEVVKKMKNYWRQLLNAKLITQRKFDNLTKAERGGLSELDKAGFIKRQLVETRQITKHVAQILDSRMNTKYDENDKLIREVKVITLKSKLVSDFRKDFQFYKVREINNYHHAHDAYLNAVVGTALIKKYPKLESEFVYGDYKVYDVRKMIAKSEQEIGKATAKYFFYSNIMNFFKTEITLANGEIRKRPLIETNGETGEIVWDKGRDFATVRKVLSMPQVNIVKKTEVQTGGFSKESILPKRNSDKLIARKKDWDPKKYGGFDSPTVAYSVLVVAKVEKGKSKKLKSVKELLGITIMERSSFEKNPIDFLEAKGYKEVKKDLIIKLPKYSLFELENGRKRMLASAGELQKGNELALPSKYVNFLYLASHYEKLKGSPEDNEQKQLFVEQHKHYLDEIIEQISEFSKRVILADANLDKVLSAYNKHRDKPIREQAENIIHLFTLTNLGAPAAFKYFDTTIDRKRYTSTKEVLDATLIHQSITGLYETRIDLSQLGGD

SEQ ID NO: 200 - DNA, 4212 bp, Artificial Sequence
  Description of artificial sequence: wild-type Cas9 polynucleotide sequence
  misc_feature (5)..(58): RuvC domain
  misc_feature (718)..(764): RuvC domain
  misc_feature (772)..(901): HNH domain
  misc_feature (906)..(1101): RuvC domain
atggataaaaagtattctattggtttagacatcggcactaattccgttggatgggctgtcataaccgatgaatacaaagtaccttcaaagaaatttaaggtgttggggaacacagaccgtcattcgattaaaaagaatcttatcggtgccctcctattcgatagtggcgaaacggcagaggcgactcgcctgaaacgaaccgctcggagaaggtatacacgtcgcaagaaccgaatatgttacttacaagaaatttttagcaatgagatggccaaagttgacgattctttctttcaccgtttggaagagtccttccttgtcgaagaggacaagaaacatgaacggcaccccatctttggaaacatagtagatgaggtggcatatcatgaaaagtacccaacgatttatcacctcagaaaaaagctagttgactcaactgataaagcggacctgaggttaatctacttggctcttgcccatatgataaagttccgtgggcactttctcattgagggtgatctaaatccggacaactcggatgtcgacaaactgttcatccagttagtacaaacctataatcagttgtttgaagagaaccctataaatgcaagtggcgtggatgcgaaggctattcttagcgcccgcctctctaaatcccgacggctagaaaacctgatcgcacaattacccggagagaagaaaaatgggttgttcggtaaccttatagcgctctcactaggcctgacaccaaattttaagtcgaacttcgacttagctgaagatgccaaattgcagcttagtaaggacacgtacgatgacgatctcgacaatctactggcacaaattggagatcagtatgcggacttatttttggctgccaaaaaccttagcgatgcaatcctcctatctgacatactgagagttaatactgagattaccaaggcgccgttatccgcttcaatgatcaaaaggtacgatgaacatcaccaagacttgacacttctcaaggccctagtccgtcagcaactgcctgagaaatataaggaaatattctttgatcagtcgaaaaacgggtacgcaggttatattgacggcggagcgagtcaagaggaattctacaagtttatcaaacccatattagagaagatggatgggacggaagagttgcttgtaaaactcaatcgcgaagatctactgcgaaagcagcggactttcgacaacggtagcattccacatcaaatccacttaggcgaattgcatgctatacttagaaggcaggaggatttttatccgttcctcaaagacaatcgtgaaaagattgagaaaatcctaacctttcgcataccttactatgtgggacccctggcccgagggaactctcggttcgcatggatgacaagaaagtccgaagaaacgattactccatggaattttgaggaagttgtcgataaaggtgcgtcagctcaatcgttcatcgagaggatgaccaactttgacaagaatttaccgaacgaaaaagtattgcctaagcacagtttactttacgagtatttcacagtgtacaatgaactcacgaaagttaagtatgtcactgagggcatgcgtaaacccgcctttctaagcggagaacagaagaaagcaatagtagatctgttattcaagaccaaccgcaaagtgacagttaagcaattgaaagaggactactttaagaaaattgaatgcttcgattctgtcgagatctccggggtagaagatcgatttaatgcgtcacttggtacgtatcatgacctcctaaagataattaaagataaggacttcctggataacgaagagaatgaagatatcttagaagatatagtgttgactcttaccctctttgaagatcgggaaatgattgaggaaagactaaaaacatacgctcacctgttcgacgataaggttatgaaacagttaaagaggcgtcgctatacgggctggggacgattgtcgcggaaacttatcaacgggataagagacaagcaaagtggtaaaactattctcgattttctaaagagcgacggcttcgccaataggaactttatgcagctgatccatgatgactctttaaccttcaaagaggatatacaaaaggcacaggtttccggacaaggggactcattgcacgaacatattgcgaatcttgctggttcgccagccatcaaaaagggcatactccagacagtcaaagtagtggatgagctagttaaggtcatgggacgtcacaaaccggaaaacattgtaatcgagatggcacgcgaaaatcaaacgactcagaaggggcaaaaaaacagtcgagagcggatgaagagaatagaagagggtattaaagaactgggcagccagatcttaaaggagcatcctgtggaaaatacccaattgcagaacgagaaactttacctctattacctacaaaatggaagggacatgtatgttgatcaggaactggacataaaccgtttatctgattacgacgtcgatcacattgtaccccaatcctttttgaaggacgattcaatcgacaataaagtgcttacacgctcggataagaaccgagggaaaagtgacaatgttccaagcgaggaagtcgtaaagaaaatgaagaactattggcggcagctcctaaatgcgaaactgataacgcaaagaaagttcgataacttaactaaagctgagaggggtggcttgtctgaacttgacaaggccggatttattaaacgtcagctcgtggaaacccgccaaatcacaaagcatgttgcacagatactagattcccgaatgaatacgaaatacgacgagaacgataagctgattcgggaagtcaaagtaatcactttaaagtcaaaattggtgtcggacttcagaaaggattttcaattctataaagttagggagataaataactaccaccatgcgcacgacgcttatcttaatgccgtcgtagggaccgcactcattaagaaatacccgaagctagaaagtgagtttgtgtatggtgattacaaagtttatgacgtccgtaagatgatcgcgaaaagcgaacaggagataggcaaggctacagccaaatacttcttttattctaacattatgaatttctttaagacggaaatcactctggcaaacggagagatacgcaaacgacctttaattgaaaccaatggggagacaggtgaaatcgtatgggataagggccgggacttcgcgacggtgagaaaagttttgtccatgccccaagtcaacatagtaaagaaaactgaggtgcagaccggagggttttcaaaggaatcgattcttccaaaaaggaatagtgataagctcatcgctcgtaaaaaggactgggacccgaaaaagtacggtggcttcgatagccctacagttgcctattctgtcctagtagtggcaaaagttgagaagggaaaatccaagaaactgaagtcagtcaaagaattattggggataacgattatggagcgctcgtcttttgaaaagaaccccatcgacttccttgaggcgaaaggttacaaggaagtaaaaaaggatctcataattaaactaccaaagtatagtctgtttgagttagaaaatggccgaaaacggatgttggctagcgccggagagcttcaaaaggggaacgaactcgcactaccgtctaaatacgtgaatttcctgtatttagcgtcccattacgagaagttgaaaggttcacctgaagataacgaacagaagcaactttttgttgagcagcacaaacattatctcgacgaaatcatagagcaaatttcggaattcagtaagagagtcatcctagctgatgccaatctggacaaagtattaagcgcatacaacaagcacagggataaacccatacgtgagcaggcggaaaatattatccatttgtttactcttaccaacctcggcgctccagccgcattcaagtattttgacacaacgatagatcgcaaacgatacacttctaccaaggaggtgctagacgcgacactgattcaccaatccatcacgggattatatgaaactcggatagatttgtcacagcttgggggtgacggatcccccaagaagaagaggaaagtctcgagcgactacaaagaccatgacggtgattataaagatcatgacatcgattacaaggatgacgatgacaaggctgcagga

SEQ ID NO: 201 - protein, 1368 aa, Artificial Sequence
  Description of artificial sequence: exemplary catalytically active Cas9 nickase (nCas9) polypeptide sequence
MDKKYSIGLAIGTNSVGWAVITDEYKVPSKKFKVLGNTDRHSIKKNLIGALLFDSGETAEATRLKRTARRRYTRRKNRICYLQEIFSNEMAKVDDSFFHRLEESFLVEEDKKHERHPIFGNIVDEVAYHEKYPTIYHLRKKLVDSTDKADLRLIYLALAHMIKFRGHFLIEGDLNPDNSDVDKLFIQLVQTYNQLFEENPINASGVDAKAILSARLSKSRRLENLIAQLPGEKKNGLFGNLIALSLGLTPNFKSNFDLAEDAKLQLSKDTYDDDLDNLLAQIGDQYADLFLAAKNLSDAILLSDILRVNTEITKAPLSASMIKRYDEHHQDLTLLKALVRQQLPEKYKEIFFDQSKNGYAGYIDGGASQEEFYKFIKPILEKMDGTEELLVKLNREDLLRKQRTFDNGSIPHQIHLGELHAILRRQEDFYPFLKDNREKIEKILTFRIPYYVGPLARGNSRFAWMTRKSEETITPWNFEEVVDKGASAQSFIERMTNFDKNLPNEKVLPKHSLLYEYFTVYNELTKVKYVTEGMRKPAFLSGEQKKAIVDLLFKTNRKVTVKQLKEDYFKKIECFDSVEISGVEDRFNASLGTYHDLLKIIKDKDFLDNEENEDILEDIVLTLTLFEDREMIEERLKTYAHLFDDKVMKQLKRRRYTGWGRLSRKLINGIRDKQSGKTILDFLKSDGFANRNFMQLIHDDSLTFKEDIQKAQVSGQGDSLHEHIANLAGSPAIKKGILQTVKVVDELVKVMGRHKPENIVIEMARENQTTQKGQKNSRERMKRIEEGIKELGSQILKEHPVENTQLQNEKLYLYYLQNGRDMYVDQELDINRLSDYDVDHIVPQSFLKDDSIDNKVLTRSDKNRGKSDNVPSEEVVKKMKNYWRQLLNAKLITQRKFDNLTKAERGGLSELDKAGFIKRQLVETRQITKHVAQILDSRMNTKYDENDKLIREVKVITLKSKLVSDFRKDFQFYKVREINNYHHAHDAYLNAVVGTALIKKYPKLESEFVYGDYKVYDVRKMIAKSEQEIGKATAKYFFYSNIMNFFKTEITLANGEIRKRPLIETNGETGEIVWDKGRDFATVRKVLSMPQVNIVKKTEVQTGGFSKESILPKRNSDKLIARKKDWDPKKYGGFDSPTVAYSVLVVAKVEKGKSKKLKSVKELLGITIMERSSFEKNPIDFLEAKGYKEVKKDLIIKLPKYSLFELENGRKRMLASAGELQKGNELALPSKYVNFLYLASHYEKLKGSPEDNEQKQLFVEQHKHYLDEIIEQISEFSKRVILADANLDKVLSAYNKHRDKPIREQAENIIHLFTLTNLGAPAAFKYFDTTIDRKRYTSTKEVLDATLIHQSITGLYETRIDLSQLGGD

SEQ ID NO: 202 - DNA, 4107 bp, Streptococcus pyogenes
  misc_feature (1)..(4107): Cas9 from Streptococcus pyogenes (NCBI Ref. Seq.: NC_002737.2) polynucleotide sequence
atggataagaaatactcaataggcttagatatcggcacaaatagcgtcggatgggcggtgatcactgatgaatataaggttccgtctaaaaagttcaaggttctgggaaatacagaccgccacagtatcaaaaaaaatcttataggggctcttttatttgacagtggagagacagcggaagcgactcgtctcaaacggacagctcgtagaaggtatacacgtcggaagaatcgtatttgttatctacaggagattttttcaaatgagatggcgaaagtagatgatagtttctttcatcgacttgaagagtcttttttggtggaagaagacaagaagcatgaacgtcatcctatttttggaaatatagtagatgaagttgcttatcatgagaaatatccaactatctatcatctgcgaaaaaaattggtagattctactgataaagcggatttgcgcttaatctatttggccttagcgcatatgattaagtttcgtggtcattttttgattgagggagatttaaatcctgataatagtgatgtggacaaactatttatccagttggtacaaacctacaatcaattatttgaagaaaaccctattaacgcaagtggagtagatgctaaagcgattctttctgcacgattgagtaaatcaagacgattagaaaatctcattgctcagctccccggtgagaagaaaaatggcttatttgggaatctcattgctttgtcattgggtttgacccctaattttaaatcaaattttgatttggcagaagatgctaaattacagctttcaaaagatacttacgatgatgatttagataatttattggcgcaaattggagatcaatatgctgatttgtttttggcagctaagaatttatcagatgctattttactttcagatatcctaagagtaaatactgaaataactaaggctcccctatcagcttcaatgattaaacgctacgatgaacatcatcaagacttgactcttttaaaagctttagttcgacaacaacttccagaaaagtataaagaaatcttttttgatcaatcaaaaaacggatatgcaggttatattgatgggggagctagccaagaagaattttataaatttatcaaaccaattttagaaaaaatggatggtactgaggaattattggtgaaactaaatcgtgaagatttgctgcgcaagcaacggacctttgacaacggctctattccccatcaaattcacttgggtgagctgcatgctattttgagaagacaagaagacttttatccatttttaaaagacaatcgtgagaagattgaaaaaatcttgacttttcgaattccttattatgttggtccattggcgcgtggcaatagtcgttttgcatggatgactcggaagtctgaagaaacaattaccccatggaattttgaagaagttgtcgataaaggtgcttcagctcaatcatttattgaacgcatgacaaactttgataaaaatcttccaaatgaaaaagtactaccaaaacatagtttgctttatgagtattttacggtttataacgaattgacaaaggtcaaatatgttactgaaggaatgcgaaaaccagcatttctttcaggtgaacagaagaaagccattgttgatttactcttcaaaacaaatcgaaaagtaaccgttaagcaattaaaagaagattatttcaaaaaaatagaatgttttgatagtgttgaaatttcaggagttgaagatagatttaatgcttcattaggtacctaccatgatttgctaaaaattattaaagataaagattttttggataatgaagaaaatgaagatatcttagaggatattgttttaacattgaccttatttgaagatagggagatgattgaggaaagacttaaaacatatgctcacctctttgatgataaggtgatgaaacagcttaaacgtcgccgttatactggttggggacgtttgtctcgaaaattgattaatggtattagggataagcaatctggcaaaacaatattagattttttgaaatcagatggttttgccaatcgcaattttatgcagctgatccatgatgatagtttgacatttaaagaagacattcaaaaagcacaagtgtctggacaaggcgatagtttacatgaacatattgcaaatttagctggtagccctgctattaaaaaaggtattttacagactgtaaaagttgttgatgaattggtcaaagtaatggggcggcataagccagaaaatatcgttattgaaatggcacgtgaaaatcagacaactcaaaagggccagaaaaattcgcgagagcgtatgaaacgaatcgaagaaggtatcaaagaattaggaagtcagattcttaaagagcatcctgttgaaaatactcaattgcaaaatgaaaagctctatctctattatctccaaaatggaagagacatgtatgtggaccaagaattagatattaatcgtttaagtgattatgatgtcgatcacattgttccacaaagtttccttaaagacgattcaatagacaataaggtcttaacgcgttctgataaaaatcgtggtaaatcggataacgttccaagtgaagaagtagtcaaaaagatgaaaaactattggagacaacttctaaacgccaagttaatcactcaacgtaagtttgataatttaacgaaagctgaacgtggaggtttgagtgaacttgataaagctggttttatcaaacgccaattggttgaaactcgccaaatcactaagcatgtggcacaaattttggatagtcgcatgaatactaaatacgatgaaaatgataaacttattcgagaggttaaagtgattaccttaaaatctaaattagtttctgacttccgaaaagatttccaattctataaagtacgtgagattaacaattaccatcatgcccatgatgcgtatctaaatgccgtcgttggaactgctttgattaagaaatatccaaaacttgaatcggagtttgtctatggtgattataaagtttatgatgttcgtaaaatgattgctaagtctgagcaagaaataggcaaagcaaccgcaaaatatttcttttactctaatatcatgaacttcttcaaaacagaaattacacttgcaaatggagagattcgcaaacgccctctaatcgaaactaatggggaaactggagaaattgtctgggataaagggcgagattttgccacagtgcgcaaagtattgtccatgccccaagtcaatattgtcaagaaaacagaagtacagacaggcggattctccaaggagtcaattttaccaaaaagaaattcggacaagcttattgctcgtaaaaaagactgggatccaaaaaaatatggtggttttgatagtccaacggtagcttattcagtcctagtggttgctaaggtggaaaaagggaaatcgaagaagttaaaatccgttaaagagttactagggatcacaattatggaaagaagttcctttgaaaaaaatccgattgactttttagaagctaaaggatataaggaagttaaaaaagacttaatcattaaactacctaaatatagtctttttgagttagaaaacggtcgtaaacggatgctggctagtgccggagaattacaaaaaggaaatgagctggctctgccaagcaaatatgtgaattttttatatttagctagtcattatgaaaagttgaagggtagtccagaagataacgaacaaaaacaattgtttgtggagcagcataagcattatttagatgagattattgagcaaatcagtgaattttctaagcgtgttattttagcagatgccaatttagataaagttcttagtgcatataacaaacatagagacaaaccaatacgtgaacaagcagaaaatattattcatttatttacgttgacgaatcttggagctcccgctgcttttaaatattttgatacaacaattgatcgtaaacgatatacgtctacaaaagaagttttagatgccactcttatccatcaatccatcactggtctttatgaaacacgcattgatttgagtcagctaggaggtgactga

SEQ ID NO: 203 - protein, 1368 aa, Artificial Sequence
  Description of sequence: catalytically inactive Cas9 (dCas9) polypeptide sequence
  MISC_FEATURE (5)..(58): RuvC domain
  MISC_FEATURE (718)..(764): RuvC domain
  MISC_FEATURE (773)..(902): HNH domain
  MISC_FEATURE (907)..(1102): RuvC domain
MDKKYSIGLAIGTNSVGWAVITDEYKVPSKKFKVLGNTDRHSIKKNLIGALLFDSGETAEATRLKRTARRRYTRRKNRICYLQEIFSNEMAKVDDSFFHRLEESFLVEEDKKHERHPIFGNIVDEVAYHEKYPTIYHLRKKLVDSTDKADLRLIYLALAHMIKFRGHFLIEGDLNPDNSDVDKLFIQLVQTYNQLFEENPINASGVDAKAILSARLSKSRRLENLIAQLPGEKKNGLFGNLIALSLGLTPNFKSNFDLAEDAKLQLSKDTYDDDLDNLLAQIGDQYADLFLAAKNLSDAILLSDILRVNTEITKAPLSASMIKRYDEHHQDLTLLKALVRQQLPEKYKEIFFDQSKNGYAGYIDGGASQEEFYKFIKPILEKMDGTEELLVKLNREDLLRKQRTFDNGSIPHQIHLGELHAILRRQEDFYPFLKDNREKIEKILTFRIPYYVGPLARGNSRFAWMTRKSEETITPWNFEEVVDKGASAQSFIERMTNFDKNLPNEKVLPKHSLLYEYFTVYNELTKVKYVTEGMRKPAFLSGEQKKAIVDLLFKTNRKVTVKQLKEDYFKKIECFDSVEISGVEDRFNASLGTYHDLLKIIKDKDFLDNEENEDILEDIVLTLTLFEDREMIEERLKTYAHLFDDKVMKQLKRRRYTGWGRLSRKLINGIRDKQSGKTILDFLKSDGFANRNFMQLIHDDSLTFKEDIQKAQVSGQGDSLHEHIANLAGSPAIKKGILQTVKVVDELVKVMGRHKPENIVIEMARENQTTQKGQKNSRERMKRIEEGIKELGSQILKEHPVENTQLQNEKLYLYYLQNGRDMYVDQELDINRLSDYDVDAIVPQSFLKDDSIDNKVLTRSDKNRGKSDNVPSEEVVKKMKNYWRQLLNAKLITQRKFDNLTKAERGGLSELDKAGFIKRQLVETRQITKHVAQILDSRMNTKYDENDKLIREVKVITLKSKLVSDFRKDFQFYKVREINNYHHAHDAYLNAVVGTALIKKYPKLESEFVYGDYKVYDVRKMIAKSEQEIGKATAKYFFYSNIMNFFKTEITLANGEIRKRPLIETNGETGEIVWDKGRDFATVRKVLSMPQVNIVKKTEVQTGGFSKESILPKRNSDKLIARKKDWDPKKYGGFDSPTVAYSVLVVAKVEKGKSKKLKSVKELLGITIMERSSFEKNPIDFLEAKGYKEVKKDLIIKLPKYSLFELENGRKRMLASAGELQKGNELALPSKYVNFLYLASHYEKLKGSPEDNEQKQLFVEQHKHYLDEIIEQISEFSKRVILADANLDKVLSAYNKHRDKPIREQAENIIHLFTLTNLGAPAAFKYFDTTIDRKRYTSTKEVLDATLIHQSITGLYETRIDLSQLGGD

SEQ ID NO: 204 - protein, 345 aa, Sulfolobus islandicus
  MISC_FEATURE (1)..(345): tr|F0NN87|F0NN87_SULIHCRISPR-associatedCasx protein OS = Sulfolobus islandicus (strain HVE10/4) GN = SiH_0402 PE=4 SV=1); CasX polypeptide sequence
MEVPLYNIFGDNYIIQVATEAENSTIYNNKVEIDDEELRNVLNLAYKIAKNNEDAAAERRGKAKKKKGEEGETTTSNIILPLSGNDKNPWTETLKCYNFPTTVALSEVFKNFSQVKECEEVSAPSFVKPEFYEFGRSPGMVERTRRVKLEVEPHYLIIAAAGWVLTRLGKAKVSEGDYVGVNVFTPTRGILYSLIQNVNGIVPGIKPETAFGLWIARKVVSSVTNPNVSVVRIYTISDAVGQNPTTINGGFSIDLTKLLEKRYLLSERLEAIARNALSISSNMRERYIVLANYIYEYLTGSKRLEDLLYFANRDLIMNLNSDDGKVRDLKLISAYVNGELIRGEG

SEQ ID NO: 205 - protein, 345 aa, Sulfolobus islandicus
  MISC_FEATURE (1)..(345): tr|F0NH53|F0NH53_SULIR CRISPR associated protein, Casx OS = Sulfolobus islandicus (strain REY15A) GN=SiRe_0771 PE=4 SV=1); CasX polypeptide sequence
MEVPLYNIFGDNYIIQVATEAENSTIYNNKVEIDDEELRNVLNLAYKIAKNNEDAAAERRGKAKKKKGEEGETTTSNIILPLSGNDKNPWTETLKCYNFPTTVALSEVFKNFSQVKECEEVSAPSFVKPEFYKFGRSPGMVERTRRVKLEVEPHYLIMAAAGWVLTRLGKAKVSEGDYVGVNVFTPTRGILYSLIQNVNGIVPGIKPETAFGLWIARKVVSSVTNPNVSVVSIYTISDAVGQNPTTINGGFSIDLTKLLEKRDLLSERLEAIARNALSISSNMRERYIVLANYIYEYLTGSKRLEDLLYFANRDLIMNLNSDDGKVRDLKLISAYVNGELIRGEG

SEQ ID NO: 206 - protein, 987 aa, Deltaproteobacteria
  MISC_FEATURE (1)..(987): CasX polypeptide sequence
MEKRINKIRKKLSADNATKPVSRSGPMKTLLVRVMTDDLKKRLEKRRKKPEVMPQVISNNAANNLRMLLDDYTKMKEAILQVYWQEFKDDHVGLMCKFAQPASKKIDQNKLKPEMDEKGNLTTAGFACSQCGQPLFVYKLEQVSEKGKAYTNYFGRCNVAEHEKLILLAQLKPVKDSDEAVTYSLGKFGQRALDFYSIHVTKESTHPVKPLAQIAGNRYASGPVGKALSDACMGTIASFLSKYQDIIIEHQKVVKGNQKRLESLRELAGKENLEYPSVTLPPQPHTKEGVDFAYNEVIARVRMWVNLNLWQKLKLSRDDAKPLLRLKGFPSFPVVERRENEVDWWNTINEVKKLIDAKRDMGRVFWSGVTAEKRNTILEGYNYLPNENDHKKREGSLENPKKPAKRQFGDLLLYLEKKYAGDWGKVFDEAWERIDKKIAGLTSHIEREEARNAEDAQSKAVLTDWLRAKASFVLERLKEMDEKEFYACEIQLQKWYGDLRGNPFAVEAENRVVDISGFSIGSDGHSIQYRNLLAWKYLENGKREFYLLMNYGKKGRIRFTDGTDIKKSGKWQGLLYGGGKAKVIDLTFDPDDEQLIILPLAFGTRQGREFIWNDLLSLETGLIKLANGRVIEKTIYNKKIGRDEPALFVALTFERREVVDPSNIKPVNLIGVARGENIPAVIALTDPEGCPLPEFKDSSGGPTDILRIGEGYKEKQRAIQAAKEVEQRRAGGYSRKFASKSRNLADDMVRNSARDLFYHAVTHDAVLVFANLSRGFGRQGKRTFMTERQYTKMEDWLTAKLAYEGLTSKTYLSKTLAQYTSKTCSNCGFTITYADMDVMLVRLKKTSDGWATTLNNKELKAEYQITYYNRYKRQTVEKELSAELDRLSEESGNNDISKWTKGRRDEALFLLKKRFSHRPVQEQFVCLDCGHEVHAAEQAALNIARSWLFLNSNSTEFKSYKSGKQPFVGAWQAFYKRRLKEVWKPNA

SEQ ID NO: 207 - protein, 1210 aa, Parcubacteria group bacterium
  MISC_FEATURE (1)..(1210): APG80656.1 CRISPR-associated protein CasY [uncultured Parcubacteria group bacterium]; CasY polypeptide sequence
MSKRHPRISGVKGYRLHAQRLEYTGKSGAMRTIKYPLYSSPSGGRTVPREIVSAINDDYVGLYGLSNFDDLYNAEKRNEEKVYSVLDFWYDCVQYGAVFSYTAPGLLKNVAEVRGGSYELTKTLKGSHLYDELQIDKVIKFLNKKEISRANGSLDKLKKDIIDCFKAEYRERHKDQCNKLADDIKNAKKDAGASLGERQKKLFRDFFGISEQSENDKPSFTNPLNLTCCLLPFDTVNNNRNRGEVLFNKLKEYAQKLDKNEGSLEMWEYIGIGNSGTAFSNFLGEGFLGRLRENKITELKKAMMDITDAWRGQEQEEELEKRLRILAALTIKLREPKFDNHWGGYRSDINGKLSSWLQNYINQTVKIKEDLKGHKKDLKKAKEMINRFGESDTKEEAVVSSLLESIEKIVPDDSADDEKPDIPAIAIYRRFLSDGRLTLNRFVQREDVQEALIKERLEAEKKKKPKKRKKKSDAEDEKETIDFKELFPHLAKPLKLVPNFYGDSKRELYKKYKNAAIYTDALWKAVEKIYKSAFSSSLKNSFFDTDFDKDFFIKRLQKIFSVYRRFNTDKWKPIVKNSFAPYCDIVSLAENEVLYKPKQSRSRKSAAIDKNRVRLPSTENIAKAGIALARELSVAGFDWKDLLKKEEHEEYIDLIELHKTALALLLAVTETQLDISALDFVENGTVKDFMKTRDGNLVLEGRFLEMFSQSIVFSELRGLAGLMSRKEFITRSAIQTMNGKQAELLYIPHEFQSAKITTPKEMSRAFLDLAPAEFATSLEPESLSEKSLLKLKQMRYYPHYFGYELTRTGQGIDGGVAENALRLEKSPVKKREIKCKQYKTLGRGQNKIVLYVRSSYYQTQFLEWFLHRPKNVQTDVAVSGSFLIDEKKVKTRWNYDALTVALEPVSGSERVFVSQPFTIFPEKSAEEEGQRYLGIDIGEYGIAYTALEITGDSAKILDQNFISDPQLKTLREEVKGLKLDQRRGTFAMPSTKIARIRESLVHSLRNRIHHLALKHKAKIVYELEVSRFEEGKQKIKKVYATLKKADVYSEIDADKNLQTTVWGKLAVASEISASYTSQFCGACKKLWRAEMQVDETITTQELIGTVRVIKGGTLIDAIKDFMRPPIFDENDTPFPKYRDFCDKHHISKKMRGNSCLFICPFCRANADADIQASQTIALLRYVKEEKKVEDYFERFRKLKNIKVLGQMKKI

SEQ ID NO: 208 - protein, 1082 aa, Neisseria meningitidis
  MISC_FEATURE (1)..(1082): NCBI Reference:  WP_002235162.1; type II CRISPR RNA-guided endonuclease Cas9; Nme1Cas9 polypeptide sequence
MAAFKPNPINYILGLDIGIASVGWAMVEIDEDENPICLIDLGVRVFERAEVPKTGDSLAMARRLARSVRRLTRRRAHRLLRARRLLKREGVLQAADFDENGLIKSLPNTPWQLRAAALDRKLTPLEWSAVLLHLIKHRGYLSQRKNEGETADKELGALLKGVADNAHALQTGDFRTPAELALNKFEKESGHIRNQRGDYSHTFSRKDLQAELILLFEKQKEFGNPHVSGGLKEGIETLLMTQRPALSGDAVQKMLGHCTFEPAEPKAAKNTYTAERFIWLTKLNNLRILEQGSERPLTDTERATLMDEPYRKSKLTYAQARKLLGLEDTAFFKGLRYGKDNAEASTLMEMKAYHAISRALEKEGLKDKKSPLNLSPELQDEIGTAFSLFKTDEDITGRLKDRIQPEILEALLKHISFDKFVQISLKALRRIVPLMEQGKRYDEACAEIYGDHYGKKNTEEKIYLPPIPADEIRNPVVLRALSQARKVINGVVRRYGSPARIHIETAREVGKSFKDRKEIEKRQEENRKDREKAAAKFREYFPNFVGEPKSKDILKLRLYEQQHGKCLYSGKEINLGRLNEKGYVEIDHALPFSRTWDDSFNNKVLVLGSENQNKGNQTPYEYFNGKDNSREWQEFKARVETSRFPRSKKQRILLQKFDEDGFKERNLNDTRYVNRFLCQFVADRMRLTGKGKKRVFASNGQITNLLRGFWGLRKVRAENDRHHALDAVVVACSTVAMQQKITRFVRYKEMNAFDGKTIDKETGEVLHQKTHFPQPWEFFAQEVMIRVFGKPDGKPEFEEADTPEKLRTLLAEKLSSRPEAVHEYVTPLFVSRAPNRKMSGQGHMETVKSAKRLDEGVSVLRVPLTQLKLKDLEKMVNREREPKLYEALKARLEAHKDDPAKAFAEPFYKYDKAGNRTQQVKAVRVEQVQKTGVWVRNHNGIADNATMVRVDVFEKGDKYYLVPIYSWQVAKGILPDRAVVQGKDEEDWQLIDDSFNFKFSLHPNDLVEVITKKARMFGYFASCHRGTGNINIRIHDLDHKIGKNGILEGIGVKTALSFQKYQIDELGKEIRPCRLKKRPPVR

SEQ ID NO: 209 - protein, 1082 aa, Neisseria meningitidis
  MISC_FEATURE (1)..(1082): NCBI Reference:  WP_002230835; type II CRISPR RNA-guided endonuclease Cas9; Nme2Cas9 polypeptide sequence
MAAFKPNPINYILGLDIGIASVGWAMVEIDEEENPIRLIDLGVRVFERAEVPKTGDSLAMARRLARSVRRLTRRRAHRLLRARRLLKREGVLQAADFDENGLIKSLPNTPWQLRAAALDRKLTPLEWSAVLLHLIKHRGYLSQRKNEGETADKELGALLKGVANNAHALQTGDFRTPAELALNKFEKESGHIRNQRGDYSHTFSRKDLQAELILLFEKQKEFGNPHVSGGLKEGIETLLMTQRPALSGDAVQKMLGHCTFEPAEPKAAKNTYTAERFIWLTKLNNLRILEQGSERPLTDTERATLMDEPYRKSKLTYAQARKLLGLEDTAFFKGLRYGKDNAEASTLMEMKAYHAISRALEKEGLKDKKSPLNLSSELQDEIGTAFSLFKTDEDITGRLKDRVQPEILEALLKHISFDKFVQISLKALRRIVPLMEQGKRYDEACAEIYGDHYGKKNTEEKIYLPPIPADEIRNPVVLRALSQARKVINGVVRRYGSPARIHIETAREVGKSFKDRKEIEKRQEENRKDREKAAAKFREYFPNFVGEPKSKDILKLRLYEQQHGKCLYSGKEINLVRLNEKGYVEIDHALPFSRTWDDSFNNKVLVLGSENQNKGNQTPYEYFNGKDNSREWQEFKARVETSRFPRSKKQRILLQKFDEDGFKECNLNDTRYVNRFLCQFVADHILLTGKGKRRVFASNGQITNLLRGFWGLRKVRAENDRHHALDAVVVACSTVAMQQKITRFVRYKEMNAFDGKTIDKETGKVLHQKTHFPQPWEFFAQEVMIRVFGKPDGKPEFEEADTPEKLRTLLAEKLSSRPEAVHEYVTPLFVSRAPNRKMSGAHKDTLRSAKRFVKHNEKISVKRVWLTEIKLADLENMVNYKNGREIELYEALKARLEAYGGNAKQAFDPKDNPFYKKGGQLVKAVRVEKTQESGVLLNKKNAYTIADNGDMVRVDVFCKVDKKGKNQYFIVPIYAWQVAENILPDIDCKGYRIDDSYTFCFSLHKYDLIAFQKDEKSKVEFAYYINCDSSNGRFYLAWHDKGSKEQQFRISTQNLVLIQKYQVNELGKEIRPCRLKKRPPVR

SEQ ID NO: 210 - protein, 1300 aa, Francisella novicida
  MISC_FEATURE (1)..(1300): wild type Cpf1 polypeptide sequence
MSIYQEFVNKYSLSKTLRFELIPQGKTLENIKARGLILDDEKRAKDYKKAKQIIDKYHQFFIEEILSSVCISEDLLQNYSDVYFKLKKSDDDNLQKDFKSAKDTIKKQISEYIKDSEKFKNLFNQNLIDAKKGQESDLILWLKQSKDNGIELFKANSDITDIDEALEIIKSFKGWTTYFKGFHENRKNVYSSNDIPTSIIYRIVDDNLPKFLENKAKYESLKDKAPEAINYEQIKKDLAEELTFDIDYKTSEVNQRVFSLDEVFEIANFNNYLNQSGITKFNTIIGGKFVNGENTKRKGINEYINLYSQQINDKTLKKYKMSVLFKQILSDTESKSFVIDKLEDDSDVVTTMQSFYEQIAAFKTVEEKSIKETLSLLFDDLKAQKLDLSKIYFKNDKSLTDLSQQVFDDYSVIGTAVLEYITQQIAPKNLDNPSKKEQELIAKKTEKAKYLSLETIKLALEEFNKHRDIDKQCRFEEILANFAAIPMIFDEIAQNKDNLAQISIKYQNQGKKDLLQASAEDDVKAIKDLLDQTNNLLHKLKIFHISQSEDKANILDKDEHFYLVFEECYFELANIVPLYNKIRNYITQKPYSDEKFKLNFENSTLANGWDKNKEPDNTAILFIKDDKYYLGVMNKKNNKIFDDKAIKENKGEGYKKIVYKLLPGANKMLPKVFFSAKSIKFYNPSEDILRIRNHSTHTKNGSPQKGYEKFEFNIEDCRKFIDFYKQSISKHPEWKDFGFRFSDTQRYNSIDEFYREVENQGYKLTFENISESYIDSVVNQGKLYLFQIYNKDFSAYSKGRPNLHTLYWKALFDERNLQDVVYKLNGEAELFYRKQSIPKKITHPAKEAIANKNKDNPKKESVFEYDLIKDKRFTEDKFFFHCPITINFKSSGANKFNDEINLLLKEKANDVHILSIDRGERHLAYYTLVDGKGNIIKQDTFNIIGNDRMKTNYHDKLAAIEKDRDSARKDWKKINNIKEMKEGYLSQVVHEIAKLVIEYNAIVVFEDLNFGFKRGRFKVEKQVYQKLEKMLIEKLNYLVFKDNEFDKTGGVLRAYQLTAPFETFKKMGKQTGIIYYVPAGFTSKICPVTGFVNQLYPKYESVSKSQEFFSKFDKICYNLDKGYFEFSFDYKNFGDKAAKGKWTIASFGSRLINFRNSDKNHNWDTREVYPTKELEKLLKDYSIEYGHGECIKAAICGESDKKFFAKLTSVLNTILQMRNSKTGTELDYLISPVADVNGNFFDSRQAPKNMPQDADANGAYHIGLKGLMLLGRIKNNQEGKKLNLVIKNEEYFEFVQNRNN

SEQ ID NO: 211 - protein, 1300 aa, Francisella novicida
  MISC_FEATURE (1)..(1300): Cpf1 D917A polypeptide sequence
MSIYQEFVNKYSLSKTLRFELIPQGKTLENIKARGLILDDEKRAKDYKKAKQIIDKYHQFFIEEILSSVCISEDLLQNYSDVYFKLKKSDDDNLQKDFKSAKDTIKKQISEYIKDSEKFKNLFNQNLIDAKKGQESDLILWLKQSKDNGIELFKANSDITDIDEALEIIKSFKGWTTYFKGFHENRKNVYSSNDIPTSIIYRIVDDNLPKFLENKAKYESLKDKAPEAINYEQIKKDLAEELTFDIDYKTSEVNQRVFSLDEVFEIANFNNYLNQSGITKFNTIIGGKFVNGENTKRKGINEYINLYSQQINDKTLKKYKMSVLFKQILSDTESKSFVIDKLEDDSDVVTTMQSFYEQIAAFKTVEEKSIKETLSLLFDDLKAQKLDLSKIYFKNDKSLTDLSQQVFDDYSVIGTAVLEYITQQIAPKNLDNPSKKEQELIAKKTEKAKYLSLETIKLALEEFNKHRDIDKQCRFEEILANFAAIPMIFDEIAQNKDNLAQISIKYQNQGKKDLLQASAEDDVKAIKDLLDQTNNLLHKLKIFHISQSEDKANILDKDEHFYLVFEECYFELANIVPLYNKIRNYITQKPYSDEKFKLNFENSTLANGWDKNKEPDNTAILFIKDDKYYLGVMNKKNNKIFDDKAIKENKGEGYKKIVYKLLPGANKMLPKVFFSAKSIKFYNPSEDILRIRNHSTHTKNGSPQKGYEKFEFNIEDCRKFIDFYKQSISKHPEWKDFGFRFSDTQRYNSIDEFYREVENQGYKLTFENISESYIDSVVNQGKLYLFQIYNKDFSAYSKGRPNLHTLYWKALFDERNLQDVVYKLNGEAELFYRKQSIPKKITHPAKEAIANKNKDNPKKESVFEYDLIKDKRFTEDKFFFHCPITINFKSSGANKFNDEINLLLKEKANDVHILSIARGERHLAYYTLVDGKGNIIKQDTFNIIGNDRMKTNYHDKLAAIEKDRDSARKDWKKINNIKEMKEGYLSQVVHEIAKLVIEYNAIVVFEDLNFGFKRGRFKVEKQVYQKLEKMLIEKLNYLVFKDNEFDKTGGVLRAYQLTAPFETFKKMGKQTGIIYYVPAGFTSKICPVTGFVNQLYPKYESVSKSQEFFSKFDKICYNLDKGYFEFSFDYKNFGDKAAKGKWTIASFGSRLINFRNSDKNHNWDTREVYPTKELEKLLKDYSIEYGHGECIKAAICGESDKKFFAKLTSVLNTILQMRNSKTGTELDYLISPVADVNGNFFDSRQAPKNMPQDADANGAYHIGLKGLMLLGRIKNNQEGKKLNLVIKNEEYFEFVQNRNN

SEQ ID NO: 212 - protein, 1300 aa, Francisella novicida
  MISC_FEATURE (1)..(1300): Cpf1 E1006A polypeptide sequence
MSIYQEFVNKYSLSKTLRFELIPQGKTLENIKARGLILDDEKRAKDYKKAKQIIDKYHQFFIEEILSSVCISEDLLQNYSDVYFKLKKSDDDNLQKDFKSAKDTIKKQISEYIKDSEKFKNLFNQNLIDAKKGQESDLILWLKQSKDNGIELFKANSDITDIDEALEIIKSFKGWTTYFKGFHENRKNVYSSNDIPTSIIYRIVDDNLPKFLENKAKYESLKDKAPEAINYEQIKKDLAEELTFDIDYKTSEVNQRVFSLDEVFEIANFNNYLNQSGITKFNTIIGGKFVNGENTKRKGINEYINLYSQQINDKTLKKYKMSVLFKQILSDTESKSFVIDKLEDDSDVVTTMQSFYEQIAAFKTVEEKSIKETLSLLFDDLKAQKLDLSKIYFKNDKSLTDLSQQVFDDYSVIGTAVLEYITQQIAPKNLDNPSKKEQELIAKKTEKAKYLSLETIKLALEEFNKHRDIDKQCRFEEILANFAAIPMIFDEIAQNKDNLAQISIKYQNQGKKDLLQASAEDDVKAIKDLLDQTNNLLHKLKIFHISQSEDKANILDKDEHFYLVFEECYFELANIVPLYNKIRNYITQKPYSDEKFKLNFENSTLANGWDKNKEPDNTAILFIKDDKYYLGVMNKKNNKIFDDKAIKENKGEGYKKIVYKLLPGANKMLPKVFFSAKSIKFYNPSEDILRIRNHSTHTKNGSPQKGYEKFEFNIEDCRKFIDFYKQSISKHPEWKDFGFRFSDTQRYNSIDEFYREVENQGYKLTFENISESYIDSVVNQGKLYLFQIYNKDFSAYSKGRPNLHTLYWKALFDERNLQDVVYKLNGEAELFYRKQSIPKKITHPAKEAIANKNKDNPKKESVFEYDLIKDKRFTEDKFFFHCPITINFKSSGANKFNDEINLLLKEKANDVHILSIDRGERHLAYYTLVDGKGNIIKQDTFNIIGNDRMKTNYHDKLAAIEKDRDSARKDWKKINNIKEMKEGYLSQVVHEIAKLVIEYNAIVVFADLNFGFKRGRFKVEKQVYQKLEKMLIEKLNYLVFKDNEFDKTGGVLRAYQLTAPFETFKKMGKQTGIIYYVPAGFTSKICPVTGFVNQLYPKYESVSKSQEFFSKFDKICYNLDKGYFEFSFDYKNFGDKAAKGKWTIASFGSRLINFRNSDKNHNWDTREVYPTKELEKLLKDYSIEYGHGECIKAAICGESDKKFFAKLTSVLNTILQMRNSKTGTELDYLISPVADVNGNFFDSRQAPKNMPQDADANGAYHIGLKGLMLLGRIKNNQEGKKLNLVIKNEEYFEFVQNRNN

SEQ ID NO: 213 - protein, 1300 aa, Francisella novicida
  MISC_FEATURE (1)..(1300): Cpf1 D1255A polypeptide sequence
MSIYQEFVNKYSLSKTLRFELIPQGKTLENIKARGLILDDEKRAKDYKKAKQIIDKYHQFFIEEILSSVCISEDLLQNYSDVYFKLKKSDDDNLQKDFKSAKDTIKKQISEYIKDSEKFKNLFNQNLIDAKKGQESDLILWLKQSKDNGIELFKANSDITDIDEALEIIKSFKGWTTYFKGFHENRKNVYSSNDIPTSIIYRIVDDNLPKFLENKAKYESLKDKAPEAINYEQIKKDLAEELTFDIDYKTSEVNQRVFSLDEVFEIANFNNYLNQSGITKFNTIIGGKFVNGENTKRKGINEYINLYSQQINDKTLKKYKMSVLFKQILSDTESKSFVIDKLEDDSDVVTTMQSFYEQIAAFKTVEEKSIKETLSLLFDDLKAQKLDLSKIYFKNDKSLTDLSQQVFDDYSVIGTAVLEYITQQIAPKNLDNPSKKEQELIAKKTEKAKYLSLETIKLALEEFNKHRDIDKQCRFEEILANFAAIPMIFDEIAQNKDNLAQISIKYQNQGKKDLLQASAEDDVKAIKDLLDQTNNLLHKLKIFHISQSEDKANILDKDEHFYLVFEECYFELANIVPLYNKIRNYITQKPYSDEKFKLNFENSTLANGWDKNKEPDNTAILFIKDDKYYLGVMNKKNNKIFDDKAIKENKGEGYKKIVYKLLPGANKMLPKVFFSAKSIKFYNPSEDILRIRNHSTHTKNGSPQKGYEKFEFNIEDCRKFIDFYKQSISKHPEWKDFGFRFSDTQRYNSIDEFYREVENQGYKLTFENISESYIDSVVNQGKLYLFQIYNKDFSAYSKGRPNLHTLYWKALFDERNLQDVVYKLNGEAELFYRKQSIPKKITHPAKEAIANKNKDNPKKESVFEYDLIKDKRFTEDKFFFHCPITINFKSSGANKFNDEINLLLKEKANDVHILSIDRGERHLAYYTLVDGKGNIIKQDTFNIIGNDRMKTNYHDKLAAIEKDRDSARKDWKKINNIKEMKEGYLSQVVHEIAKLVIEYNAIVVFEDLNFGFKRGRFKVEKQVYQKLEKMLIEKLNYLVFKDNEFDKTGGVLRAYQLTAPFETFKKMGKQTGIIYYVPAGFTSKICPVTGFVNQLYPKYESVSKSQEFFSKFDKICYNLDKGYFEFSFDYKNFGDKAAKGKWTIASFGSRLINFRNSDKNHNWDTREVYPTKELEKLLKDYSIEYGHGECIKAAICGESDKKFFAKLTSVLNTILQMRNSKTGTELDYLISPVADVNGNFFDSRQAPKNMPQDAAANGAYHIGLKGLMLLGRIKNNQEGKKLNLVIKNEEYFEFVQNRNN

SEQ ID NO: 214 - protein, 1300 aa, Francisella novicida
  MISC_FEATURE (1)..(1300): Cpf1 D917A/E1006A polypeptide sequence
MSIYQEFVNKYSLSKTLRFELIPQGKTLENIKARGLILDDEKRAKDYKKAKQIIDKYHQFFIEEILSSVCISEDLLQNYSDVYFKLKKSDDDNLQKDFKSAKDTIKKQISEYIKDSEKFKNLFNQNLIDAKKGQESDLILWLKQSKDNGIELFKANSDITDIDEALEIIKSFKGWTTYFKGFHENRKNVYSSNDIPTSIIYRIVDDNLPKFLENKAKYESLKDKAPEAINYEQIKKDLAEELTFDIDYKTSEVNQRVFSLDEVFEIANFNNYLNQSGITKFNTIIGGKFVNGENTKRKGINEYINLYSQQINDKTLKKYKMSVLFKQILSDTESKSFVIDKLEDDSDVVTTMQSFYEQIAAFKTVEEKSIKETLSLLFDDLKAQKLDLSKIYFKNDKSLTDLSQQVFDDYSVIGTAVLEYITQQIAPKNLDNPSKKEQELIAKKTEKAKYLSLETIKLALEEFNKHRDIDKQCRFEEILANFAAIPMIFDEIAQNKDNLAQISIKYQNQGKKDLLQASAEDDVKAIKDLLDQTNNLLHKLKIFHISQSEDKANILDKDEHFYLVFEECYFELANIVPLYNKIRNYITQKPYSDEKFKLNFENSTLANGWDKNKEPDNTAILFIKDDKYYLGVMNKKNNKIFDDKAIKENKGEGYKKIVYKLLPGANKMLPKVFFSAKSIKFYNPSEDILRIRNHSTHTKNGSPQKGYEKFEFNIEDCRKFIDFYKQSISKHPEWKDFGFRFSDTQRYNSIDEFYREVENQGYKLTFENISESYIDSVVNQGKLYLFQIYNKDFSAYSKGRPNLHTLYWKALFDERNLQDVVYKLNGEAELFYRKQSIPKKITHPAKEAIANKNKDNPKKESVFEYDLIKDKRFTEDKFFFHCPITINFKSSGANKFNDEINLLLKEKANDVHILSIARGERHLAYYTLVDGKGNIIKQDTFNIIGNDRMKTNYHDKLAAIEKDRDSARKDWKKINNIKEMKEGYLSQVVHEIAKLVIEYNAIVVFADLNFGFKRGRFKVEKQVYQKLEKMLIEKLNYLVFKDNEFDKTGGVLRAYQLTAPFETFKKMGKQTGIIYYVPAGFTSKICPVTGFVNQLYPKYESVSKSQEFFSKFDKICYNLDKGYFEFSFDYKNFGDKAAKGKWTIASFGSRLINFRNSDKNHNWDTREVYPTKELEKLLKDYSIEYGHGECIKAAICGESDKKFFAKLTSVLNTILQMRNSKTGTELDYLISPVADVNGNFFDSRQAPKNMPQDADANGAYHIGLKGLMLLGRIKNNQEGKKLNLVIKNEEYFEFVQNRNN

SEQ ID NO: 215 - protein, 1300 aa, Francisella novicida
  MISC_FEATURE (1)..(1300): Cpf1 D917A/D1255A polypeptide sequence
MSIYQEFVNKYSLSKTLRFELIPQGKTLENIKARGLILDDEKRAKDYKKAKQIIDKYHQFFIEEILSSVCISEDLLQNYSDVYFKLKKSDDDNLQKDFKSAKDTIKKQISEYIKDSEKFKNLFNQNLIDAKKGQESDLILWLKQSKDNGIELFKANSDITDIDEALEIIKSFKGWTTYFKGFHENRKNVYSSNDIPTSIIYRIVDDNLPKFLENKAKYESLKDKAPEAINYEQIKKDLAEELTFDIDYKTSEVNQRVFSLDEVFEIANFNNYLNQSGITKFNTIIGGKFVNGENTKRKGINEYINLYSQQINDKTLKKYKMSVLFKQILSDTESKSFVIDKLEDDSDVVTTMQSFYEQIAAFKTVEEKSIKETLSLLFDDLKAQKLDLSKIYFKNDKSLTDLSQQVFDDYSVIGTAVLEYITQQIAPKNLDNPSKKEQELIAKKTEKAKYLSLETIKLALEEFNKHRDIDKQCRFEEILANFAAIPMIFDEIAQNKDNLAQISIKYQNQGKKDLLQASAEDDVKAIKDLLDQTNNLLHKLKIFHISQSEDKANILDKDEHFYLVFEECYFELANIVPLYNKIRNYITQKPYSDEKFKLNFENSTLANGWDKNKEPDNTAILFIKDDKYYLGVMNKKNNKIFDDKAIKENKGEGYKKIVYKLLPGANKMLPKVFFSAKSIKFYNPSEDILRIRNHSTHTKNGSPQKGYEKFEFNIEDCRKFIDFYKQSISKHPEWKDFGFRFSDTQRYNSIDEFYREVENQGYKLTFENISESYIDSVVNQGKLYLFQIYNKDFSAYSKGRPNLHTLYWKALFDERNLQDVVYKLNGEAELFYRKQSIPKKITHPAKEAIANKNKDNPKKESVFEYDLIKDKRFTEDKFFFHCPITINFKSSGANKFNDEINLLLKEKANDVHILSIARGERHLAYYTLVDGKGNIIKQDTFNIIGNDRMKTNYHDKLAAIEKDRDSARKDWKKINNIKEMKEGYLSQVVHEIAKLVIEYNAIVVFEDLNFGFKRGRFKVEKQVYQKLEKMLIEKLNYLVFKDNEFDKTGGVLRAYQLTAPFETFKKMGKQTGIIYYVPAGFTSKICPVTGFVNQLYPKYESVSKSQEFFSKFDKICYNLDKGYFEFSFDYKNFGDKAAKGKWTIASFGSRLINFRNSDKNHNWDTREVYPTKELEKLLKDYSIEYGHGECIKAAICGESDKKFFAKLTSVLNTILQMRNSKTGTELDYLISPVADVNGNFFDSRQAPKNMPQDAAANGAYHIGLKGLMLLGRIKNNQEGKKLNLVIKNEEYFEFVQNRNN

SEQ ID NO: 216 - protein, 1300 aa, Francisella novicida
  MISC_FEATURE (1)..(1300): Cpf1 E1006A/D1255A polypeptide sequence
MSIYQEFVNKYSLSKTLRFELIPQGKTLENIKARGLILDDEKRAKDYKKAKQIIDKYHQFFIEEILSSVCISEDLLQNYSDVYFKLKKSDDDNLQKDFKSAKDTIKKQISEYIKDSEKFKNLFNQNLIDAKKGQESDLILWLKQSKDNGIELFKANSDITDIDEALEIIKSFKGWTTYFKGFHENRKNVYSSNDIPTSIIYRIVDDNLPKFLENKAKYESLKDKAPEAINYEQIKKDLAEELTFDIDYKTSEVNQRVFSLDEVFEIANFNNYLNQSGITKFNTIIGGKFVNGENTKRKGINEYINLYSQQINDKTLKKYKMSVLFKQILSDTESKSFVIDKLEDDSDVVTTMQSFYEQIAAFKTVEEKSIKETLSLLFDDLKAQKLDLSKIYFKNDKSLTDLSQQVFDDYSVIGTAVLEYITQQIAPKNLDNPSKKEQELIAKKTEKAKYLSLETIKLALEEFNKHRDIDKQCRFEEILANFAAIPMIFDEIAQNKDNLAQISIKYQNQGKKDLLQASAEDDVKAIKDLLDQTNNLLHKLKIFHISQSEDKANILDKDEHFYLVFEECYFELANIVPLYNKIRNYITQKPYSDEKFKLNFENSTLANGWDKNKEPDNTAILFIKDDKYYLGVMNKKNNKIFDDKAIKENKGEGYKKIVYKLLPGANKMLPKVFFSAKSIKFYNPSEDILRIRNHSTHTKNGSPQKGYEKFEFNIEDCRKFIDFYKQSISKHPEWKDFGFRFSDTQRYNSIDEFYREVENQGYKLTFENISESYIDSVVNQGKLYLFQIYNKDFSAYSKGRPNLHTLYWKALFDERNLQDVVYKLNGEAELFYRKQSIPKKITHPAKEAIANKNKDNPKKESVFEYDLIKDKRFTEDKFFFHCPITINFKSSGANKFNDEINLLLKEKANDVHILSIDRGERHLAYYTLVDGKGNIIKQDTFNIIGNDRMKTNYHDKLAAIEKDRDSARKDWKKINNIKEMKEGYLSQVVHEIAKLVIEYNAIVVFADLNFGFKRGRFKVEKQVYQKLEKMLIEKLNYLVFKDNEFDKTGGVLRAYQLTAPFETFKKMGKQTGIIYYVPAGFTSKICPVTGFVNQLYPKYESVSKSQEFFSKFDKICYNLDKGYFEFSFDYKNFGDKAAKGKWTIASFGSRLINFRNSDKNHNWDTREVYPTKELEKLLKDYSIEYGHGECIKAAICGESDKKFFAKLTSVLNTILQMRNSKTGTELDYLISPVADVNGNFFDSRQAPKNMPQDAAANGAYHIGLKGLMLLGRIKNNQEGKKLNLVIKNEEYFEFVQNRNN

SEQ ID NO: 217 - protein, 1300 aa, Francisella novicida
  MISC_FEATURE (1)..(1300): Cpf1 D917A/E1006A/D1255A polypeptide sequence
MSIYQEFVNKYSLSKTLRFELIPQGKTLENIKARGLILDDEKRAKDYKKAKQIIDKYHQFFIEEILSSVCISEDLLQNYSDVYFKLKKSDDDNLQKDFKSAKDTIKKQISEYIKDSEKFKNLFNQNLIDAKKGQESDLILWLKQSKDNGIELFKANSDITDIDEALEIIKSFKGWTTYFKGFHENRKNVYSSNDIPTSIIYRIVDDNLPKFLENKAKYESLKDKAPEAINYEQIKKDLAEELTFDIDYKTSEVNQRVFSLDEVFEIANFNNYLNQSGITKFNTIIGGKFVNGENTKRKGINEYINLYSQQINDKTLKKYKMSVLFKQILSDTESKSFVIDKLEDDSDVVTTMQSFYEQIAAFKTVEEKSIKETLSLLFDDLKAQKLDLSKIYFKNDKSLTDLSQQVFDDYSVIGTAVLEYITQQIAPKNLDNPSKKEQELIAKKTEKAKYLSLETIKLALEEFNKHRDIDKQCRFEEILANFAAIPMIFDEIAQNKDNLAQISIKYQNQGKKDLLQASAEDDVKAIKDLLDQTNNLLHKLKIFHISQSEDKANILDKDEHFYLVFEECYFELANIVPLYNKIRNYITQKPYSDEKFKLNFENSTLANGWDKNKEPDNTAILFIKDDKYYLGVMNKKNNKIFDDKAIKENKGEGYKKIVYKLLPGANKMLPKVFFSAKSIKFYNPSEDILRIRNHSTHTKNGSPQKGYEKFEFNIEDCRKFIDFYKQSISKHPEWKDFGFRFSDTQRYNSIDEFYREVENQGYKLTFENISESYIDSVVNQGKLYLFQIYNKDFSAYSKGRPNLHTLYWKALFDERNLQDVVYKLNGEAELFYRKQSIPKKITHPAKEAIANKNKDNPKKESVFEYDLIKDKRFTEDKFFFHCPITINFKSSGANKFNDEINLLLKEKANDVHILSIARGERHLAYYTLVDGKGNIIKQDTFNIIGNDRMKTNYHDKLAAIEKDRDSARKDWKKINNIKEMKEGYLSQVVHEIAKLVIEYNAIVVFADLNFGFKRGRFKVEKQVYQKLEKMLIEKLNYLVFKDNEFDKTGGVLRAYQLTAPFETFKKMGKQTGIIYYVPAGFTSKICPVTGFVNQLYPKYESVSKSQEFFSKFDKICYNLDKGYFEFSFDYKNFGDKAAKGKWTIASFGSRLINFRNSDKNHNWDTREVYPTKELEKLLKDYSIEYGHGECIKAAICGESDKKFFAKLTSVLNTILQMRNSKTGTELDYLISPVADVNGNFFDSRQAPKNMPQDAAANGAYHIGLKGLMLLGRIKNNQEGKKLNLVIKNEEYFEFVQNRNN

SEQ ID NO: 218 - protein, 1052 aa, Staphylococcus aureus
  MISC_FEATURE (1)..(1052): Exemplary SaCas9 polypeptide sequence
KRNYILGLDIGITSVGYGIIDYETRDVIDAGVRLFKEANVENNEGRRSKRGARRLKRRRRHRIQRVKKLLFDYNLLTDHSELSGINPYEARVKGLSQKLSEEEFSAALLHLAKRRGVHNVNEVEEDTGNELSTKEQISRNSKALEEKYVAELQLERLKKDGEVRGSINRFKTSDYVKEAKQLLKVQKAYHQLDQSFIDTYIDLLETRRTYYEGPGEGSPFGWKDIKEWYEMLMGHCTYFPEELRSVKYAYNADLYNALNDLNNLVITRDENEKLEYYEKFQIIENVFKQKKKPTLKQIAKEILVNEEDIKGYRVTSTGKPEFTNLKVYHDIKDITARKEIIENAELLDQIAKILTIYQSSEDIQEELTNLNSELTQEEIEQISNLKGYTGTHNLSLKAINLILDELWHTNDNQIAIFNRLKLVPKKVDLSQQKEIPTTLVDDFILSPVVKRSFIQSIKVINAIIKKYGLPNDIIIELAREKNSKDAQKMINEMQKRNRQTNERIEEIIRTTGKENAKYLIEKIKLHDMQEGKCLYSLEAIPLEDLLNNPFNYEVDHIIPRSVSFDNSFNNKVLVKQEENSKKGNRTPFQYLSSSDSKISYETFKKHILNLAKGKGRISKTKKEYLLEERDINRFSVQKDFINRNLVDTRYATRGLMNLLRSYFRVNNLDVKVKSINGGFTSFLRRKWKFKKERNKGYKHHAEDALIIANADFIFKEWKKLDKAKKVMENQMFEEKQAESMPEIETEQEYKEIFITPHQIKHIKDFKDYKYSHRVDKKPNRELINDTLYSTRKDDKGNTLIVNNLNGLYDKDNDKLKKLINKSPEKLLMYHHDPQTYQKLKLIMEQYGDEKNPLYKYYEETGNYLTKYSKKDNGPVIKKIKYYGNKLNAHLDITDDYPNSRNKVVKLSLKPYRFDVYLDNGVYKFVTVKNLDVIKKENYYEVNSKCYEEAKKLKKISNQAEFIASFYNNDLIKINGELYRVIGVNNDLLNRIEVNMIDITYREYLENMNDKRPPRIIKTIASKTQSIKKYSTDILGNLYEVKSKKHPQIIKKG

SEQ ID NO: 219 - protein, 1052 aa, Staphylococcus aureus
  MISC_FEATURE (1)..(1052): SaCas9n polypeptide sequence
KRNYILGLDIGITSVGYGIIDYETRDVIDAGVRLFKEANVENNEGRRSKRGARRLKRRRRHRIQRVKKLLFDYNLLTDHSELSGINPYEARVKGLSQKLSEEEFSAALLHLAKRRGVHNVNEVEEDTGNELSTKEQISRNSKALEEKYVAELQLERLKKDGEVRGSINRFKTSDYVKEAKQLLKVQKAYHQLDQSFIDTYIDLLETRRTYYEGPGEGSPFGWKDIKEWYEMLMGHCTYFPEELRSVKYAYNADLYNALNDLNNLVITRDENEKLEYYEKFQIIENVFKQKKKPTLKQIAKEILVNEEDIKGYRVTSTGKPEFTNLKVYHDIKDITARKEIIENAELLDQIAKILTIYQSSEDIQEELTNLNSELTQEEIEQISNLKGYTGTHNLSLKAINLILDELWHTNDNQIAIFNRLKLVPKKVDLSQQKEIPTTLVDDFILSPVVKRSFIQSIKVINAIIKKYGLPNDIIIELAREKNSKDAQKMINEMQKRNRQTNERIEEIIRTTGKENAKYLIEKIKLHDMQEGKCLYSLEAIPLEDLLNNPFNYEVDHIIPRSVSFDNSFNNKVLVKQEEASKKGNRTPFQYLSSSDSKISYETFKKHILNLAKGKGRISKTKKEYLLEERDINRFSVQKDFINRNLVDTRYATRGLMNLLRSYFRVNNLDVKVKSINGGFTSFLRRKWKFKKERNKGYKHHAEDALIIANADFIFKEWKKLDKAKKVMENQMFEEKQAESMPEIETEQEYKEIFITPHQIKHIKDFKDYKYSHRVDKKPNRELINDTLYSTRKDDKGNTLIVNNLNGLYDKDNDKLKKLINKSPEKLLMYHHDPQTYQKLKLIMEQYGDEKNPLYKYYEETGNYLTKYSKKDNGPVIKKIKYYGNKLNAHLDITDDYPNSRNKVVKLSLKPYRFDVYLDNGVYKFVTVKNLDVIKKENYYEVNSKCYEEAKKLKKISNQAEFIASFYNNDLIKINGELYRVIGVNNDLLNRIEVNMIDITYREYLENMNDKRPPRIIKTIASKTQSIKKYSTDILGNLYEVKSKKHPQIIKKG

SEQ ID NO: 220 - protein, 1052 aa, Staphylococcus aureus
  MISC_FEATURE (1)..(1052): SaKKH Cas9 polypeptide sequence
KRNYILGLDIGITSVGYGIIDYETRDVIDAGVRLFKEANVENNEGRRSKRGARRLKRRRRHRIQRVKKLLFDYNLLTDHSELSGINPYEARVKGLSQKLSEEEFSAALLHLAKRRGVHNVNEVEEDTGNELSTKEQISRNSKALEEKYVAELQLERLKKDGEVRGSINRFKTSDYVKEAKQLLKVQKAYHQLDQSFIDTYIDLLETRRTYYEGPGEGSPFGWKDIKEWYEMLMGHCTYFPEELRSVKYAYNADLYNALNDLNNLVITRDENEKLEYYEKFQIIENVFKQKKKPTLKQIAKEILVNEEDIKGYRVTSTGKPEFTNLKVYHDIKDITARKEIIENAELLDQIAKILTIYQSSEDIQEELTNLNSELTQEEIEQISNLKGYTGTHNLSLKAINLILDELWHTNDNQIAIFNRLKLVPKKVDLSQQKEIPTTLVDDFILSPVVKRSFIQSIKVINAIIKKYGLPNDIIIELAREKNSKDAQKMINEMQKRNRQTNERIEEIIRTTGKENAKYLIEKIKLHDMQEGKCLYSLEAIPLEDLLNNPFNYEVDHIIPRSVSFDNSFNNKVLVKQEEASKKGNRTPFQYLSSSDSKISYETFKKHILNLAKGKGRISKTKKEYLLEERDINRFSVQKDFINRNLVDTRYATRGLMNLLRSYFRVNNLDVKVKSINGGFTSFLRRKWKFKKERNKGYKHHAEDALIIANADFIFKEWKKLDKAKKVMENQMFEEKQAESMPEIETEQEYKEIFITPHQIKHIKDFKDYKYSHRVDKKPNRKLINDTLYSTRKDDKGNTLIVNNLNGLYDKDNDKLKKLINKSPEKLLMYHHDPQTYQKLKLIMEQYGDEKNPLYKYYEETGNYLTKYSKKDNGPVIKKIKYYGNKLNAHLDITDDYPNSRNKVVKLSLKPYRFDVYLDNGVYKFVTVKNLDVIKKENYYEVNSKCYEEAKKLKKISNQAEFIASFYKNDLIKINGELYRVIGVNNDLLNRIEVNMIDITYREYLENMNDKRPPHIIKTIASKTQSIKKYSTDILGNLYEVKSKKHPQIIKKG

SEQ ID NO: 221 - protein, 707 aa, Artificial Sequence
  Description of artificial sequence: Casphi-1 polypeptide sequence
MADTPTLFTQFLRHHLPGQRFRKDILKQAGRILANKGEDATIAFLRGKSEESPPDFQPPVKCPIIACSRPLTEWPIYQASVAIQGYVYGQSLAEFEASDPGCSKDGLLGWFDKTGVCTDYFSVQGLNLIFQNARKRYIGVQTKVTNRNEKRHKKLKRINAKRIAEGLPELTSDEPESALDETGHLIDPPGLNTNIYCYQQVSPKPLALSEVNQLPTAYAGYSTSGDDPIQPMVTKDRLSISKGQPGYIPEHQRALLSQKKHRRMRGYGLKARALLVIVRIQDDWAVIDLRSLLRNAYWRRIVQTKEPSTITKLLKLVTGDPVLDATRMVATFTYKPGIVQVRSAKCLKNKQGSKLFSERYLNETVSVTSIDLGSNNLVAVATYRLVNGNTPELLQRFTLPSHLVKDFERYKQAHDTLEDSIQKTAVASLPQGQQTEIRMWSMYGFREAQERVCQELGLADGSIPWNVMTATSTILTDLFLARGGDPKKCMFTSEPKKKKNSKQVLYKIRDRAWAKMYRTLLSKETREAWNKALWGLKRGSPDYARLSKRKEELARRCVNYTISTAEKRAQCGRTIVALEDLNIGFFHGRGKQEPGWVGLFTRKKENRWLMQALHKAFLELAHHRGYHVIEVNPAYTSQTCPVCRHCDPDNRDQHNREAFHCIGCGFRGNADLDVATHNIAMVAITGESLKRARGSVASKTPQPLAAE

SEQ ID NO: 222 - protein, 757 aa, Artificial Sequence
  Description of artificial sequence: Casphi-2 polypeptide sequence
MPKPAVESEFSKVLKKHFPGERFRSSYMKRGGKILAAQGEEAVVAYLQGKSEEEPPNFQPPAKCHVVTKSRDFAEWPIMKASEAIQRYIYALSTTERAACKPGKSSESHAAWFAATGVSNHGYSHVQGLNLIFDHTLGRYDGVLKKVQLRNEKARARLESINASRADEGLPEIKAEEEEVATNETGHLLQPPGINPSFYVYQTISPQAYRPRDEIVLPPEYAGYVRDPNAPIPLGVVRNRCDIQKGCPGYIPEWQREAGTAISPKTGKAVTVPGLSPKKNKRMRRYWRSEKEKAQDALLVTVRIGTDWVVIDVRGLLRNARWRTIAPKDISLNALLDLFTGDPVIDVRRNIVTFTYTLDACGTYARKWTLKGKQTKATLDKLTATQTVALVAIDLGQTNPISAGISRVTQENGALQCEPLDRFTLPDDLLKDISAYRIAWDRNEEELRARSVEALPEAQQAEVRALDGVSKETARTQLCADFGLDPKRLPWDKMSSNTTFISEALLSNSVSRDQVFFTPAPKKGAKKKAPVEVMRKDRTWARAYKPRLSVEAQKLKNEALWALKRTSPEYLKLSRRKEELCRRSINYVIEKTRRRTQCQIVIPVIEDLNVRFFHGSGKRLPGWDNFFTAKKENRWFIQGLHKAFSDLRTHRSFYVFEVRPERTSITCPKCGHCEVGNRDGEAFQCLSCGKTCNADLDVATHNLTQVALTGKTMPKREEPRDAQGTAPARKTKKASKSKAPPAEREDQTPAQEPSQTS

SEQ ID NO: 223 - protein, 766 aa, Artificial Sequence
  Description of artificial sequence: Casphi-3 polypeptide sequence
MEKEITELTKIRREFPNKKFSSTDMKKAGKLLKAEGPDAVRDFLNSCQEIIGDFKPPVKTNIVSISRPFEEWPVSMVGRAIQEYYFSLTKEELESVHPGTSSEDHKSFFNITGLSNYNYTSVQGLNLIFKNAKAIYDGTLVKANNKNKKLEKKFNEINHKRSLEGLPIITPDFEEPFDENGHLNNPPGINRNIYGYQGCAAKVFVPSKHKMVSLPKEYEGYNRDPNLSLAGFRNRLEIPEGEPGHVPWFQRMDIPEGQIGHVNKIQRFNFVHGKNSGKVKFSDKTGRVKRYHHSKYKDATKPYKFLEESKKVSALDSILAIITIGDDWVVFDIRGLYRNVFYRELAQKGLTAVQLLDLFTGDPVIDPKKGVVTFSYKEGVVPVFSQKIVPRFKSRDTLEKLTSQGPVALLSVDLGQNEPVAARVCSLKNINDKITLDNSCRISFLDDYKKQIKDYRDSLDELEIKIRLEAINSLETNQQVEIRDLDVFSADRAKANTVDMFDIDPNLISWDSMSDARVSTQISDLYLKNGGDESRVYFEINNKRIKRSDYNISQLVRPKLSDSTRKNLNDSIWKLKRTSEEYLKLSKRKLELSRAVVNYTIRQSKLLSGINDIVIILEDLDVKKKFNGRGIRDIGWDNFFSSRKENRWFIPAFHKAFSELSSNRGLCVIEVNPAWTSATCPDCGFCSKENRDGINFTCRKCGVSYHADIDVATLNIARVAVLGKPMSGPADRERLGDTKKPRVARSRKTMKRKDISNSTVEAMVTA

SEQ ID NO: 224 - protein, 765 aa, Artificial Sequence
  Description of artificial sequence: Casphi-4 polypeptide sequence
MYSLEMADLKSEPSLLAKLLRDRFPGKYWLPKYWKLAEKKRLTGGEEAACEYMADKQLDSPPPNFRPPARCVILAKSRPFEDWPVHRVASKAQSFVIGLSEQGFAALRAAPPSTADARRDWLRSHGASEDDLMALEAQLLETIMGNAISLHGGVLKKIDNANVKAAKRLSGRNEARLNKGLQELPPEQEGSAYGADGLLVNPPGLNLNIYCRKSCCPKPVKNTARFVGHYPGYLRDSDSILISGTMDRLTIIEGMPGHIPAWQREQGLVKPGGRRRRLSGSESNMRQKVDPSTGPRRSTRSGTVNRSNQRTGRNGDPLLVEIRMKEDWVLLDARGLLRNLRWRESKRGLSCDHEDLSLSGLLALFSGDPVIDPVRNEVVFLYGEGIIPVRSTKPVGTRQSKKLLERQASMGPLTLISCDLGQTNLIAGRASAISLTHGSLGVRSSVRIELDPEIIKSFERLRKDADRLETEILTAAKETLSDEQRGEVNSHEKDSPQTAKASLCRELGLHPPSLPWGQMGPSTTFIADMLISHGRDDDAFLSHGEFPTLEKRKKFDKRFCLESRPLLSSETRKALNESLWEVKRTSSEYARLSQRKKEMARRAVNFVVEISRRKTGLSNVIVNIEDLNVRIFHGGGKQAPGWDGFFRPKSENRWFIQAIHKAFSDLAAHHGIPVIESDPQRTSMTCPECGHCDSKNRNGVRFLCKGCGASMDADFDAACRNLERVALTGKPMPKPSTSCERLLSATTGKVCSDHSLSHDAIEKAS

SEQ ID NO: 225 - protein, 793 aa, Artificial Sequence
  Description of artificial sequence: Casphi-5 polypeptide sequence
MSSLPTPLELLKQKHADLFKGLQFSSKDNKMAGKVLKKDGEEAALAFLSERGVSRGELPNFRPPAKTLVVAQSRPFEEFPIYRVSEAIQLYVYSLSVKELETVPSGSSTKKEHQRFFQDSSVPDFGYTSVQGLNKIFGLARGIYLGVITRGENQLQKAKSKHEALNKKRRASGEAETEFDPTPYEYMTPERKLAKPPGVNHSIMCYVDISVDEFDFRNPDGIVLPSEYAGYCREINTAIEKGTVDRLGHLKGGPGYIPGHQRKESTTEGPKINFRKGRIRRSYTALYAKRDSRRVRQGKLALPSYRHHMMRLNSNAESAILAVIFFGKDWVVFDLRGLLRNVRWRNLFVDGSTPSTLLGMFGDPVIDPKRGVVAFCYKEQIVPVVSKSITKMVKAPELLNKLYLKSEDPLVLVAIDLGQTNPVGVGVYRVMNASLDYEVVTRFALESELLREIESYRQRTNAFEAQIRAETFDAMTSEEQEEITRVRAFSASKAKENVCHRFGMPVDAVDWATMGSNTIHIAKWVMRHGDPSLVEVLEYRKDNEIKLDKNGVPKKVKLTDKRIANLTSIRLRFSQETSKHYNDTMWELRRKHPVYQKLSKSKADFSRRVVNSIIRRVNHLVPRARIVFIIEDLKNLGKVFHGSGKRELGWDSYFEPKSENRWFIQVLHKAFSETGKHKGYYIIECWPNWTSCTCPKCSCCDSENRHGEVFRCLACGYTCNTDFGTAPDNLVKIATTGKGLPGPKKRCKGSSKGKNPKIARSSETGVSVTESGAPKVKKSSPTQTSQSSSQSAP

SEQ ID NO: 226 - protein, 441 aa, Artificial Sequence
  Description of artificial sequence: Casphi-6 polypeptide sequence
MNKIEKEKTPLAKLMNENFAGLRFPFAIIKQAGKKLLKEGELKTIEYMTGKGSIEPLPNFKPPVKCLIVAKRRDLKYFPICKASCEIQSYVYSLNYKDFMDYFSTPMTSQKQHEEFFKKSGLNIEYQNVAGLNLIFNNVKNTYNGVILKVKNRNEKLKKKAIKNNYEFEEIKTFNDDGCLINKPGINNVIYCFQSISPKILKNITHLPKEYNDYDCSVDRNIIQKYVSRLDIPESQPGHVPEWQRKLPEFNNTNNPRRRRKWYSNGRNISKGYSVDQVNQAKIEDSLLAQIKIGEDWIILDIRGLLRDLNRRELISYKNKLTIKDVLGFFSDYPIIDIKKNLVTFCYKEGVIQVVSQKSIGNKKSKQLLEKLIENKPIALVSIDLGQTNPVSVKISKLNKINNKISIESFTYRFLNEEILKEIEKYRKDYDKLELKLINEA

SEQ ID NO: 227 - protein, 772 aa, Artificial Sequence
  Description of artificial sequence: Casphi-7 polypeptide sequence
MSNTAVSTREHMSNKTTPPSPLSLLLRAHFPGLKFESQDYKIAGKKLRDGGPEAVISYLTGKGQAKLKDVKPPAKAFVIAQSRPFIEWDLVRVSRQIQEKIFGIPATKGRPKQDGLSETAFNEAVASLEVDGKSKLNEETRAAFYEVLGLDAPSLHAQAQNALIKSAISIREGVLKKVENRNEKNLSKTKRRKEAGEEATFVEEKAHDERGYLIHPPGVNQTIPGYQAVVIKSCPSDFIGLPSGCLAKESAEALTDYLPHDRMTIPKGQPGYVPEWQHPLLNRRKNRRRRDWYSASLNKPKATCSKRSGTPNRKNSRTDQIQSGRFKGAIPVLMRFQDEWVIIDIRGLLRNARYRKLLKEKSTIPDLLSLFTGDPSIDMRQGVCTFIYKAGQACSAKMVKTKNAPEILSELTKSGPVVLVSIDLGQTNPIAAKVSRVTQLSDGQLSHETLLRELLSNDSSDGKEIARYRVASDRLRDKLANLAVERLSPEHKSEILRAKNDTPALCKARVCAALGLNPEMIAWDKMTPYTEFLATAYLEKGGDRKVATLKPKNRPEMLRRDIKFKGTEGVRIEVSPEAAEAYREAQWDLQRTSPEYLRLSTWKQELTKRILNQLRHKAAKSSQCEVVVMAFEDLNIKMMHGNGKWADGGWDAFFIKKRENRWFMQAFHKSLTELGAHKGVPTIEVTPHRTSITCTKCGHCDKANRDGERFACQKCGFVAHADLEIATDNIERVALTGKPMPKPESERSGDAKKSVGARKAAFKPEEDAEAAE

SEQ ID NO: 228 - protein, 717 aa, Artificial Sequence
  Description of artificial sequence: Casphi-8 polypeptide sequence
MIKPTVSQFLTPGFKLIRNHSRTAGLKLKNEGEEACKKFVRENEIPKDECPNFQGGPAIANIIAKSREFTEWEIYQSSLAIQEVIFTLPKDKLPEPILKEEWRAQWLSEHGLDTVPYKEAAGLNLIIKNAVNTYKGVQVKVDNKNKNNLAKINRKNEIAKLNGEQEISFEEIKAFDDKGYLLQKPSPNKSIYCYQSVSPKPFITSKYHNVNLPEEYIGYYRKSNEPIVSPYQFDRLRIPIGEPGYVPKWQYTFLSKKENKRRKLSKRIKNVSPILGIICIKKDWCVFDMRGLLRTNHWKKYHKPTDSINDLFDYFTGDPVIDTKANVVRFRYKMENGIVNYKPVREKKGKELLENICDQNGSCKLATVDVGQNNPVAIGLFELKKVNGELTKTLISRHPTPIDFCNKITAYRERYDKLESSIKLDAIKQLTSEQKIEVDNYNNNFTPQNTKQIVCSKLNINPNDLPWDKMISGTHFISEKAQVSNKSEIYFTSTDKGKTKDVMKSDYKWFQDYKPKLSKEVRDALSDIEWRLRRESLEFNKLSKSREQDARQLANWISSMCDVIGIENLVKKNNFFGGSGKREPGWDNFYKPKKENRWWINAIHKALTELSQNKGKRVILLPAMRTSITCPKCKYCDSKNRNGEKFNCLKCGIELNADIDVATENLATVAITAQSMPKPTCERSGDAKKPVRARKAKAPEFHDKLAPSYTVVLREAV

SEQ ID NO: 229 - protein, 793 aa, Artificial Sequence
  Description of artificial sequence: Casphi-9 polypeptide sequence
MRSSREIGDKILMRQPAEKTAFQVFRQEVIGTQKLSGGDAKTAGRLYKQGKMEAAREWLLKGARDDVPPNFQPPAKCLVVAVSHPFEEWDISKTNHDVQAYIYAQPLQAEGHLNGLSEKWEDTSADQHKLWFEKTGVPDRGLPVQAINKIAKAAVNRAFGVVRKVENRNEKRRSRDNRIAEHNRENGLTEVVREAPEVATNADGFLLHPPGIDPSILSYASVSPVPYNSSKHSFVRLPEEYQAYNVEPDAPIPQFVVEDRFAIPPGQPGYVPEWQRLKCSTNKHRRMRQWSNQDYKPKAGRRAKPLEFQAHLTRERAKGALLVVMRIKEDWVVFDVRGLLRNVEWRKVLSEEAREKLTLKGLLDLFTGDPVIDTKRGIVTFLYKAEITKILSKRTVKTKNARDLLLRLTEPGEDGLRREVGLVAVDLGQTHPIAAAIYRIGRTSAGALESTVLHRQGLREDQKEKLKEYRKRHTALDSRLRKEAFETLSVEQQKEIVTVSGSGAQITKDKVCNYLGVDPSTLPWEKMGSYTHFISDDFLRRGGDPNIVHFDRQPKKGKVSKKSQRIKRSDSQWVGRMRPRLSQETAKARMEADWAAQNENEEYKRLARSKQELARWCVNTLLQNTRCITQCDEIVVVIEDLNVKSLHGKGAREPGWDNFFTPKTENRWFIQILHKTFSELPKHRGEHVIEGCPLRTSITCPACSYCDKNSRNGEKFVCVACGATFHADFEVATYNLVRLATTGMPMPKSLERQGGGEKAGGARKARKKAKQVEKIVVQANANVTMNGASLHSP

SEQ ID NO: 230 - protein, 812 aa, Artificial Sequence
  Description of artificial sequence: Casphi-10 polypeptide sequence
MDMLDTETNYATETPAQQQDYSPKPPKKAQRAPKGFSKKARPEKKPPKPITLFTQKHFSGVRFLKRVIRDASKILKLSESRTITFLEQAIERDGSAPPDVTPPVHNTIMAVTRPFEEWPEVILSKALQKHCYALTKKIKIKTWPKKGPGKKCLAAWSARTKIPLIPGQVQATNGLFDRIGSIYDGVEKKVTNRNANKKLEYDEAIKEGRNPAVPEYETAYNIDGTLINKPGYNPNLYITQSRTPRLITEADRPLVEKILWQMVEKKTQSRNQARRARLEKAAHLQGLPVPKFVPEKVDRSQKIEIRIIDPLDKIEPYMPQDRMAIKASQDGHVPYWQRPFLSKRRNRRVRAGWGKQVSSIQAWLTGALLVIVRLGNEAFLADIRGALRNAQWRKLLKPDATYQSLFNLFTGDPVVNTRTNHLTMAYREGVVNIVKSRSFKGRQTREHLLTLLGQGKTVAGVSFDLGQKHAAGLLAAHFGLGEDGNPVFTPIQACFLPQRYLDSLTNYRNRYDALTLDMRRQSLLALTPAQQQEFADAQRDPGGQAKRACCLKLNLNPDEIRWDLVSGISTMISDLYIERGGDPRDVHQQVETKPKGKRKSEIRILKIRDGKWAYDFRPKIADETRKAQREQLWKLQKASSEFERLSRYKINIARAIANWALQWGRELSGCDIVIPVLEDLNVGSKFFDGKGKWLLGWDNRFTPKKENRWFIKVLHKAVAELAPHRGVPVYEVMPHRTSMTCPACHYCHPTNREGDRFECQSCHVVKNTDRDVAPYNILRVAVEGKTLDRWQAEKKPQAEPDRPMILIDNQES

SEQ ID NO: 231 - protein, 84 aa, Artificial Sequence
  Description of artificial sequence: synthetic polypeptide sequence
MTNLSDIIEKETGKQLVIQESILMLPEEVEEVIGNKPESDILVHTAYDESTDENVMLLTSDAPEYKPWALVIQDSNGENKIKML

SEQ ID NO: 232 - protein, 1129 aa, Alicyclobacillus acido-terrestris
  MISC_FEATURE (1)..(1129): Cas12b/C2c1; sp|T0D7A2|C2C1_ALIAG CRISPR-associated endonuclease C2c1 OS = Alicyclobacillus acido-terrestris (strain ATCC 49025 / DSM 3922/ CIP 106132 / NCIMB 13137/GD3B) GN=c2c1 PE=1 SV=1; Cas12b/C2c1 polypeptide sequence
MAVKSIKVKLRLDDMPEIRAGLWKLHKEVNAGVRYYTEWLSLLRQENLYRRSPNGDGEQECDKTAEECKAELLERLRARQVENGHRGPAGSDDELLQLARQLYELLVPQAIGAKGDAQQIARKFLSPLADKDAVGGLGIAKAGNKPRWVRMREAGEPGWEEEKEKAETRKSADRTADVLRALADFGLKPLMRVYTDSEMSSVEWKPLRKGQAVRTWDRDMFQQAIERMMSWESWNQRVGQEYAKLVEQKNRFEQKNFVGQEHLVHLVNQLQQDMKEASPGLESKEQTAHYVTGRALRGSDKVFEKWGKLAPDAPFDLYDAEIKNVQRRNTRRFGSHDLFAKLAEPEYQALWREDASFLTRYAVYNSILRKLNHAKMFATFTLPDATAHPIWTRFDKLGGNLHQYTFLFNEFGERRHAIRFHKLLKVENGVAREVDDVTVPISMSEQLDNLLPRDPNEPIALYFRDYGAEQHFTGEFGGAKIQCRRDQLAHMHRRRGARDVYLNVSVRVQSQSEARGERRPPYAAVFRLVGDNHRAFVHFDKLSDYLAEHPDDGKLGSEGLLSGLRVMSVDLGLRTSASISVFRVARKDELKPNSKGRVPFFFPIKGNDNLVAVHERSQLLKLPGETESKDLRAIREERQRTLRQLRTQLAYLRLLVRCGSEDVGRRERSWAKLIEQPVDAANHMTPDWREAFENELQKLKSLHGICSDKEWMDAVYESVRRVWRHMGKQVRDWRKDVRSGERPKIRGYAKDVVGGNSIEQIEYLERQYKFLKSWSFFGKVSGQVIRAEKGSRFAITLREHIDHAKEDRLKKLADRIIMEALGYVYALDERGKGKWVAKYPPCQLILLEELSEYQFNNDRPPSENNQLMQWSHRGVFQELINQAQVHDLLVGTMYAAFSSRFDARTGAPGIRCRRVPARCTQEHNPEPFPWWLNKFVVEHTLDACPLRADDLIPTGEGEIFVSPFSAEEGDFHQIHADLNAAQNLQQRLWSDFDISQIRLRCDWGEVDGELVLIPRLTGKRTADSYSNKVFYTNTGVTYYERERGKKRRKVFAQEKLSEEEAELLVEADEAREKSVVLMRDPSGIINRGNWTRQKEFWSMVNQRIEGYLVKQIRSRVPLQDSACENTGDI

SEQ ID NO: 233 - protein, 1368 aa, Mus musculus
  MISC_FEATURE (1)..(1368): high fidelity Cas9 polypeptide sequence
MDKKYSIGLAIGTNSVGWAVITDEYKVPSKKFKVLGNTDRHSIKKNLIGALLFDSGETAEATRLKRTARRRYTRRKNRICYLQEIFSNEMAKVDDSFFHRLEESFLVEEDKKHERHPIFGNIVDEVAYHEKYPTIYHLRKKLVDSTDKADLRLIYLALAHMIKFRGHFLIEGDLNPDNSDVDKLFIQLVQTYNQLFEENPINASGVDAKAILSARLSKSRRLENLIAQLPGEKKNGLFGNLIALSLGLTPNFKSNFDLAEDAKLQLSKDTYDDDLDNLLAQIGDQYADLFLAAKNLSDAILLSDILRVNTEITKAPLSASMIKRYDEHHQDLTLLKALVRQQLPEKYKEIFFDQSKNGYAGYIDGGASQEEFYKFIKPILEKMDGTEELLVKLNREDLLRKQRTFDNGSIPHQIHLGELHAILRRQEDFYPFLKDNREKIEKILTFRIPYYVGPLARGNSRFAWMTRKSEETITPWNFEEVVDKGASAQSFIERMTAFDKNLPNEKVLPKHSLLYEYFTVYNELTKVKYVTEGMRKPAFLSGEQKKAIVDLLFKTNRKVTVKQLKEDYFKKIECFDSVEISGVEDRFNASLGTYHDLLKIIKDKDFLDNEENEDILEDIVLTLTLFEDREMIEERLKTYAHLFDDKVMKQLKRRRYTGWGALSRKLINGIRDKQSGKTILDFLKSDGFANRNFMALIHDDSLTFKEDIQKAQVSGQGDSLHEHIANLAGSPAIKKGILQTVKVVDELVKVMGRHKPENIVIEMARENQTTQKGQKNSRERMKRIEEGIKELGSQILKEHPVENTQLQNEKLYLYYLQNGRDMYVDQELDINRLSDYDVDHIVPQSFLKDDSIDNKVLTRSDKNRGKSDNVPSEEVVKKMKNYWRQLLNAKLITQRKFDNLTKAERGGLSELDKAGFIKRQLVETRAITKHVAQILDSRMNTKYDENDKLIREVKVITLKSKLVSDFRKDFQFYKVREINNYHHAHDAYLNAVVGTALIKKYPKLESEFVYGDYKVYDVRKMIAKSEQEIGKATAKYFFYSNIMNFFKTEITLANGEIRKRPLIETNGETGEIVWDKGRDFATVRKVLSMPQVNIVKKTEVQTGGFSKESILPKRNSDKLIARKKDWDPKKYGGFDSPTVAYSVLVVAKVEKGKSKKLKSVKELLGITIMERSSFEKNPIDFLEAKGYKEVKKDLIIKLPKYSLFELENGRKRMLASAGELQKGNELALPSKYVNFLYLASHYEKLKGSPEDNEQKQLFVEQHKHYLDEIIEQISEFSKRVILADANLDKVLSAYNKHRDKPIREQAENIIHLFTLTNLGAPAAFKYFDTTIDRKRYTSTKEVLDATLIHQSITGLYETRIDLSQLGGD

SEQ ID NO: 234 - protein, 1368 aa, S. pyogenes
  MISC_FEATURE (1)..(1368): PAM-binding SpEQR Cas9 polypeptide sequence
MDKKYSIGLAIGTNSVGWAVITDEYKVPSKKFKVLGNTDRHSIKKNLIGALLFDSGETAEATRLKRTARRRYTRRKNRICYLQEIFSNEMAKVDDSFFHRLEESVLVEEDKKHERHPIFGNIVDEVAYHEKYPTIYHLRKKLVDSTDKADLRLIYLALAHMIKFRGHFLIEGDLNPDNSDVDKLFIQLVQTYNQLFEENPINASGVDAKAILSARLSKSRRLENLIAQLPGEKKNGLFGNLIALSLGLTPNFKSNFDLAEDAKLQLSKDTYDDDLDNLLAQIGDQYADLFLAAKNLSDAILLSDILRVNTEITKAPLSASMIKRYDEHHQDLTLLKALVRQQLPEKYKEIFFDQSKNGYAGYIDGGASQEEFYKFIKPILEKMDGTEELLVKLNREDLLRKQRTFDNGSIPHQIHLGELHAILRRQEDFYPFLKDNREKIEKILTFRIPYYVGPLARGNSRFAWMTRKSEETITPWNFEEVVDKGASAQSFIERMTNFDKNLPNEKVLPKHSLLYEYFTVYNELTKVKYVTEGMRKPAFLSGEQKKAIVDLLFKTNRKVTVKQLKEDYFKKIECFDSVEISGVEDRFNASLGTYHDLLKIIKDKDFLDNEENEDILEDIVLTLTLFEDREMIEERLKTYAHLFDDKVMKQLKRRRYTGWGRLSRKLINGIRDKQSGKTILDFLKSDGFANRNFMQLIHDDSLTFKEDIQKAQVSGQGDSLHEHIANLAGSPAIKKGILQTVKVVDELVKVMGRHKPENIVIEMARENQTTQKGQKNSRERMKRIEEGIKELGSQILKEHPVENTQLQNEKLYLYYLQNGRDMYVDQELDINRLSDYDVDHIVPQSFLKDDSIDNKVLTRSDKNRGKSDNVPSEEVVKKMKNYWRQLLNAKLITQRKFDNLTKAERGGLSELDKAGFIKRQLVETRQITKHVAQILDSRMNTKYDENDKLIREVKVITLKSKLVSDFRKDFQFYKVREINNYHHAHDAYLNAVVGTALIKKYPKLESEFVYGDYKVYDVRKMIAKSEQEIGKATAKYFFYSNIMNFFKTEITLANGEIRKRPLIETNGETGEIVWDKGRDFATVRKVLSMPQVNIVKKTEVQTGGFSKESILPKRNSDKLIARKKDWDPKKYGGFESPTVAYSVLVVAKVEKGKSKKLKSVKELLGITIMERSSFEKNPIDFLEAKGYKEVKKDLIIKLPKYSLFELENGRKRMLASAGELQKGNELALPSKYVNFLYLASHYEKLKGSPEDNEQKQLFVEQHKHYLDEIIEQISEFSKRVILADANLDKVLSAYNKHRDKPIREQAENIIHLFTLTNLGAPAAFKYFDTTIDRKQYRSTKEVLDATLIHQSITGLYETRIDLSQLGGD

SEQ ID NO: 235 - protein, 1368 aa, S. pyogenes
  MISC_FEATURE (1)..(1368): PAM-binding SpVQR Cas9 polypeptide sequence
MDKKYSIGLAIGTNSVGWAVITDEYKVPSKKFKVLGNTDRHSIKKNLIGALLFDSGETAEATRLKRTARRRYTRRKNRICYLQEIFSNEMAKVDDSFFHRLEESFLVEEDKKHERHPIFGNIVDEVAYHEKYPTIYHLRKKLVDSTDKADLRLIYLALAHMIKFRGHFLIEGDLNPDNSDVDKLFIQLVQTYNQLFEENPINASGVDAKAILSARLSKSRRLENLIAQLPGEKKNGLFGNLIALSLGLTPNFKSNFDLAEDAKLQLSKDTYDDDLDNLLAQIGDQYADLFLAAKNLSDAILLSDILRVNTEITKAPLSASMIKRYDEHHQDLTLLKALVRQQLPEKYKEIFFDQSKNGYAGYIDGGASQEEFYKFIKPILEKMDGTEELLVKLNREDLLRKQRTFDNGSIPHQIHLGELHAILRRQEDFYPFLKDNREKIEKILTFRIPYYVGPLARGNSRFAWMTRKSEETITPWNFEEVVDKGASAQSFIERMTNFDKNLPNEKVLPKHSLLYEYFTVYNELTKVKYVTEGMRKPAFLSGEQKKAIVDLLFKTNRKVTVKQLKEDYFKKIECFDSVEISGVEDRFNASLGTYHDLLKIIKDKDFLDNEENEDILEDIVLTLTLFEDREMIEERLKTYAHLFDDKVMKQLKRRRYTGWGRLSRKLINGIRDKQSGKTILDFLKSDGFANRNFMQLIHDDSLTFKEDIQKAQVSGQGDSLHEHIANLAGSPAIKKGILQTVKVVDELVKVMGRHKPENIVIEMARENQTTQKGQKNSRERMKRIEEGIKELGSQILKEHPVENTQLQNEKLYLYYLQNGRDMYVDQELDINRLSDYDVDHIVPQSFLKDDSIDNKVLTRSDKNRGKSDNVPSEEVVKKMKNYWRQLLNAKLITQRKFDNLTKAERGGLSELDKAGFIKRQLVETRQITKHVAQILDSRMNTKYDENDKLIREVKVITLKSKLVSDFRKDFQFYKVREINNYHHAHDAYLNAVVGTALIKKYPKLESEFVYGDYKVYDVRKMIAKSEQEIGKATAKYFFYSNIMNFFKTEITLANGEIRKRPLIETNGETGEIVWDKGRDFATVRKVLSMPQVNIVKKTEVQTGGFSKESILPKRNSDKLIARKKDWDPKKYGGFVSPTVAYSVLVVAKVEKGKSKKLKSVKELLGITIMERSSFEKNPIDFLEAKGYKEVKKDLIIKLPKYSLFELENGRKRMLASAGELQKGNELALPSKYVNFLYLASHYEKLKGSPEDNEQKQLFVEQHKHYLDEIIEQISEFSKRVILADANLDKVLSAYNKHRDKPIREQAENIIHLFTLTNLGAPAAFKYFDTTIDRKQYRSTKEVLDATLIHQSITGLYETRIDLSQLGGD

SEQ ID NO: 236 - protein, 1368 aa, S. pyogenes
  MISC_FEATURE (1)..(1368): SpVQR Cas9 polypeptide sequence
MDKKYSIGLAIGTNSVGWAVITDEYKVPSKKFKVLGNTDRHSIKKNLIGALLFDSGETAEATRLKRTARRRYTRRKNRICYLQEIFSNEMAKVDDSFFHRLEESFLVEEDKKHERHPIFGNIVDEVAYHEKYPTIYHLRKKLVDSTDKADLRLIYLALAHMIKFRGHFLIEGDLNPDNSDVDKLFIQLVQTYNQLFEENPINASGVDAKAILSARLSKSRRLENLIAQLPGEKKNGLFGNLIALSLGLTPNFKSNFDLAEDAKLQLSKDTYDDDLDNLLAQIGDQYADLFLAAKNLSDAILLSDILRVNTEITKAPLSASMIKRYDEHHQDLTLLKALVRQQLPEKYKEIFFDQSKNGYAGYIDGGASQEEFYKFIKPILEKMDGTEELLVKLNREDLLRKQRTFDNGSIPHQIHLGELHAILRRQEDFYPFLKDNREKIEKILTFRIPYYVGPLARGNSRFAWMTRKSEETITPWNFEEVVDKGASAQSFIERMTNFDKNLPNEKVLPKHSLLYEYFTVYNELTKVKYVTEGMRKPAFLSGEQKKAIVDLLFKTNRKVTVKQLKEDYFKKIECFDSVEISGVEDRFNASLGTYHDLLKIIKDKDFLDNEENEDILEDIVLTLTLFEDREMIEERLKTYAHLFDDKVMKQLKRRRYTGWGRLSRKLINGIRDKQSGKTILDFLKSDGFANRNFMQLIHDDSLTFKEDIQKAQVSGQGDSLHEHIANLAGSPAIKKGILQTVKVVDELVKVMGRHKPENIVIEMARENQTTQKGQKNSRERMKRIEEGIKELGSQILKEHPVENTQLQNEKLYLYYLQNGRDMYVDQELDINRLSDYDVDHIVPQSFLKDDSIDNKVLTRSDKNRGKSDNVPSEEVVKKMKNYWRQLLNAKLITQRKFDNLTKAERGGLSELDKAGFIKRQLVETRQITKHVAQILDSRMNTKYDENDKLIREVKVITLKSKLVSDFRKDFQFYKVREINNYHHAHDAYLNAVVGTALIKKYPKLESEFVYGDYKVYDVRKMIAKSEQEIGKATAKYFFYSNIMNFFKTEITLANGEIRKRPLIETNGETGEIVWDKGRDFATVRKVLSMPQVNIVKKTEVQTGGFSKESILPKRNSDKLIARKKDWDPKKYGGFVSPTVAYSVLVVAKVEKGKSKKLKSVKELLGITIMERSSFEKNPIDFLEAKGYKEVKKDLIIKLPKYSLFELENGRKRMLASARELQKGNELALPSKYVNFLYLASHYEKLKGSPEDNEQKQLFVEQHKHYLDEIIEQISEFSKRVILADANLDKVLSAYNKHRDKPIREQAENIIHLFTLTNLGAPAAFKYFDTTIDRKEYRSTKEVLDATLIHQSITGLYETRIDLSQLGGD

SEQ ID NO: 237 - protein, 1359 aa, Streptococcus macacae
  MISC_FEATURE (1)..(1359): SpyMacCas9 polypeptide sequence
MDKKYSIGLDIGTNSVGWAVITDDYKVPSKKFKVLGNTDRHSIKKNLIGALLFGSGETAEATRLKRTARRRYTRRKNRICYLQEIFSNEMAKVDDSFFHRLEESFLVEEDKKHERHPIFGNIVDEVAYHEKYPTIYHLRKKLADSTDKADLRLIYLALAHMIKFRGHFLIEGDLNPDNSDVDKLFIQLVQIYNQLFEENPINASRVDAKAILSARLSKSRRLENLIAQLPGEKRNGLFGNLIALSLGLTPNFKSNFDLAEDAKLQLSKDTYDDDLDNLLAQIGDQYADLFLAAKNLSDAILLSDILRVNSEITKAPLSASMIKRYDEHHQDLTLLKALVRQQLPEKYKEIFFDQSKNGYAGYIDGGASQEEFYKFIKPILEKMDGTEELLVKLNREDLLRKQRTFDNGSIPHQIHLGELHAILRRQEDFYPFLKDNREKIEKILTFRIPYYVGPLARGNSRFAWMTRKSEETITPWNFEEVVDKGASAQSFIERMTNFDKNLPNEKVLPKHSLLYEYFTVYNELTKVKYVTEGMRKPAFLSGEQKKAIVDLLFKTNRKVTVKQLKEDYFKKIECFDSVEISGVEDRFNASLGAYHDLLKIIKDKDFLDNEENEDILEDIVLTLTLFEDRGMIEERLKTYAHLFDDKVMKQLKRRRYTGWGRLSRKLINGIRDKQSGKTILDFLKSDGFANRNFMQLIHDDSLTFKEDIQKAQVSGQGHSLHEQIANLAGSPAIKKGILQTVKIVDELVKVMGHKPENIVIEMARENQTTQKGQKNSRERMKRIEEGIKELGSQILKEHPVENTQLQNEKLYLYYLQNGRDMYVDQELDINRLSDYDVDHIVPQSFIKDDSIDNKVLTRSDKNRGKSDNVPSEEVVKKMKNYWRQLLNAKLITQRKFDNLTKAERGGLSELDKAGFIKRQLVETRQITKHVAQILDSRMNTKYDENDKLIREVKVITLKSKLVSDFRKDFQFYKVREINNYHHAHDAYLNAVVGTALIKKYPKLESEFVYGDYKVYDVRKMIAKSEQEIGKATAKYFFYSNIMNFFKTEITLANGEIRKRPLIETNGETGEIVWDKGRDFATVRKVLSMPQVNIVKKTEIQTVGQNGGLFDDNPKSPLEVTPSKLVPLKKELNPKKYGGYQKPTTAYPVLLITDTKQLIPISVMNKKQFEQNPVKFLRDRGYQQVGKNDFIKLPKYTLVDIGDGIKRLWASSKEIHKGNQLVVSKKSQILLYHAHHLDSDLSNDYLQNHNQQFDVLFNEIISFSKKCKLGKEHIQKIENVYSNKKNSASIEELAESFIKLLGFTQLGATSPFNFLGVKLNQKQYKGKKDYILPCTEGTLIRQSITGLYETRVDLSKIGED

SEQ ID NO: 238 - protein, 1410 aa, Artificial Sequence
  Description of artificial sequence: CP5 polypeptide sequence
  MISC_FEATURE (1)..(341): Sequence derived from Cas9
  MISC_FEATURE (342)..(362): Linker sequence
  MISC_FEATURE (363)..(1388): Sequence derived from Cas9
  MISC_FEATURE (1389)..(1410): Bipartite nuclear localization sequence
EIGKATAKYFFYSNIMNFFKTEITLANGEIRKRPLIETNGETGEIVWDKGRDFATVRKVLSMPQVNIVKKTEVQTGGFSKESILPKRNSDKLIARKKDWDPKKYGGFMQPTVAYSVLVVAKVEKGKSKKLKSVKELLGITIMERSSFEKNPIDFLEAKGYKEVKKDLIIKLPKYSLFELENGRKRMLASAKFLQKGNELALPSKYVNFLYLASHYEKLKGSPEDNEQKQLFVEQHKHYLDEIIEQISEFSKRVILADANLDKVLSAYNKHRDKPIREQAENIIHLFTLTNLGAPRAFKYFDTTIARKEYRSTKEVLDATLIHQSITGLYETRIDLSQLGGDGGSGGSGGSGGSGGSGGSGGMDKKYSIGLAIGTNSVGWAVITDEYKVPSKKFKVLGNTDRHSIKKNLIGALLFDSGETAEATRLKRTARRRYTRRKNRICYLQEIFSNEMAKVDDSFFHRLEESFLVEEDKKHERHPIFGNIVDEVAYHEKYPTIYHLRKKLVDSTDKADLRLIYLALAHMIKFRGHFLIEGDLNPDNSDVDKLFIQLVQTYNQLFEENPINASGVDAKAILSARLSKSRRLENLIAQLPGEKKNGLFGNLIALSLGLTPNFKSNFDLAEDAKLQLSKDTYDDDLDNLLAQIGDQYADLFLAAKNLSDAILLSDILRVNTEITKAPLSASMIKRYDEHHQDLTLLKALVRQQLPEKYKEIFFDQSKNGYAGYIDGGASQEEFYKFIKPILEKMDGTEELLVKLNREDLLRKQRTFDNGSIPHQIHLGELHAILRRQEDFYPFLKDNREKIEKILTFRIPYYVGPLARGNSRFAWMTRKSEETITPWNFEEVVDKGASAQSFIERMTNFDKNLPNEKVLPKHSLLYEYFTVYNELTKVKYVTEGMRKPAFLSGEQKKAIVDLLFKTNRKVTVKQLKEDYFKKIECFDSVEISGVEDRFNASLGTYHDLLKIIKDKDFLDNEENEDILEDIVLTLTLFEDREMIEERLKTYAHLFDDKVMKQLKRRRYTGWGRLSRKLINGIRDKQSGKTILDFLKSDGFANRNFMQLIHDDSLTFKEDIQKAQVSGQGDSLHEHIANLAGSPAIKKGILQTVKVVDELVKVMGRHKPENIVIEMARENQTTQKGQKNSRERMKRIEEGIKELGSQILKEHPVENTQLQNEKLYLYYLQNGRDMYVDQELDINRLSDYDVDHIVPQSFLKDDSIDNKVLTRSDKNRGKSDNVPSEEVVKKMKNYWRQLLNAKLITQRKFDNLTKAERGGLSELDKAGFIKRQLVETRQITKHVAQILDSRMNTKYDENDKLIREVKVITLKSKLVSDFRKDFQFYKVREINNYHHAHDAYLNAVVGTALIKKYPKLESEFVYGDYKVYDVRKMIAKSEQEGADKRTADGSEFESPKKKRKV

SEQ ID NO: 239 - protein, 1302 aa, Artificial Sequence
  Description of artificial sequence: Cas12c1 polypeptide sequence
MQTKKTHLHLISAKASRKYRRTIACLSDTAKKDLERRKQSGAADPAQELSCLKTIKFKLEVPEGSKLPSFDRISQIYNALETIEKGSLSYLLFALILSGFRIFPNSSAAKTFASSSCYKNDQFASQIKEIFGEMVKNFIPSELESILKKGRRKNNKDWTEENIKRVLNSEFGRKNSEGSSALFDSFLSKFSQELFRKFDSWNEVNKKYLEAAELLDSMLASYGPFDSVCKMIGDSDSRNSLPDKSTIAFTNNAEITVDIESSVMPYMAIAALLREYRQSKSKAAPVAYVQSHLTTTNGNGLSWFFKFGLDLIRKAPVSSKQSTSDGSKSLQELFSVPDDKLDGLKFIKEACEALPEASLLCGEKGELLGYQDFRTSFAGHIDSWVANYVNRLFELIELVNQLPESIKLPSILTQKNHNLVASLGLQEAEVSHSLELFEGLVKNVRQTLKKLAGIDISSSPNEQDIKEFYAFSDVLNRLGSIRNQIENAVQTAKKDKIDLESAIEWKEWKKLKKLPKLNGLGGGVPKQQELLDKALESVKQIRHYQRIDFERVIQWAVNEHCLETVPKFLVDAEKKKINKESSTDFAAKENAVRFLLEGIGAAARGKTDSVSKAAYNWFVVNNFLAKKDLNRYFINCQGCIYKPPYSKRRSLAFALRSDNKDTIEVVWEKFETFYKEISKEIEKFNIFSQEFQTFLHLENLRMKLLLRRIQKPIPAEIAFFSLPQEYYDSLPPNVAFLALNQEITPSEYITQFNLYSSFLNGNLILLRRSRSYLRAKFSWVGNSKLIYAAKEARLWKIPNAYWKSDEWKMILDSNVLVFDKAGNVLPAPTLKKVCEREGDLRLFYPLLRQLPHDWCYRNPFVKSVGREKNVIEVNKEGEPKVASALPGSLFRLIGPAPFKSLLDDCFFNPLDKDLRECMLIVDQEISQKVEAQKVEASLESCTYSIAVPIRYHLEEPKVSNQFENVLAIDQGEAGLAYAVFSLKSIGEAETKPIAVGTIRIPSIRRLIHSVSTYRKKKQRLQNFKQNYDSTAFIMRENVTGDVCAKIVGLMKEFNAFPVLEYDVKNLESGSRQLSAVYKAVNSHFLYFKEPGRDALRKQLWYGGDSWTIDGIEIVTRERKEDGKEGVEKIVPLKVFPGRSVSARFTSKTCSCCGRNVFDWLFTEKKAKTNKKFNVNSKGELTTADGVIQLFEADRSKGPKFYARRKERTPLTKPIAKGSYSLEEIERRVRTNLRRAPKSKQSRDTSQSQYFCVYKDCALHFSGMQADENAAINIGRRFLTALRKNRRSDFPSNVKISDRLLDN

SEQ ID NO: 240 - protein, 1218 aa, Artificial Sequence
  Description of artificial sequence: Cas12c2 polypeptide sequence
MTKHSIPLHAFRNSGADARKWKGRIALLAKRGKETMRTLQFPLEMSEPEAAAINTTPFAVAYNAIEGTGKGTLFDYWAKLHLAGFRFFPSGGAATIFRQQAVFEDASWNAAFCQQSGKDWPWLVPSKLYERFTKAPREVAKKDGSKKSIEFTQENVANESHVSLVGASITDKTPEDQKEFFLKMAGALAEKFDSWKSANEDRIVAMKVIDEFLKSEGLHLPSLENIAVKCSVETKPDNATVAWHDAPMSGVQNLAIGVFATCASRIDNIYDLNGGKLSKLIQESATTPNVTALSWLFGKGLEYFRTTDIDTIMQDFNIPASAKESIKPLVESAQAIPTMTVLGKKNYAPFRPNFGGKIDSWIANYASRLMLLNDILEQIEPGFELPQALLDNETLMSGIDMTGDELKELIEAVYAWVDAAKQGLATLLGRGGNVDDAVQTFEQFSAMMDTLNGTLNTISARYVRAVEMAGKDEARLEKLIECKFDIPKWCKSVPKLVGISGGLPKVEEEIKVMNAAFKDVRARMFVRFEEIAAYVASKGAGMDVYDALEKRELEQIKKLKSAVPERAHIQAYRAVLHRIGRAVQNCSEKTKQLFSSKVIEMGVFKNPSHLNNFIFNQKGAIYRSPFDRSRHAPYQLHADKLLKNDWLELLAEISATLMASESTEQMEDALRLERTRLQLQLSGLPDWEYPASLAKPDIEVEIQTALKMQLAKDTVTSDVLQRAFNLYSSVLSGLTFKLLRRSFSLKMRFSVADTTQLIYVPKVCDWAIPKQYLQAEGEIGIAARVVTESSPAKMVTEVEMKEPKALGHFMQQAPHDWYFDASLGGTQVAGRIVEKGKEVGKERKLVGYRMRGNSAYKTVLDKSLVGNTELSQCSMIIEIPYTQTVDADFRAQVQAGLPKVSINLPVKETITASNKDEQMLFDRFVAIDLGERGLGYAVFDAKTLELQESGHRPIKAITNLLNRTHHYEQRPNQRQKFQAKFNVNLSELRENTVGDVCHQINRICAYYNAFPVLEYMVPDRLDKQLKSVYESVTNRYIWSSTDAHKSARVQFWLGGETWEHPYLKSAKDKKPLVLSPGRGASGKGTSQTCSCCGRNPFDLIKDMKPRAKIAVVDGKAKLENSELKLFERNLESKDDMLARRHRNERAGMEQPLTPGNYTVDEIKALLRANLRRAPKNRRTKDTTVSEYHCVFSDCGKTMHADENAAVNIGGKFIADIEK

SEQ ID NO: 241 - protein, 1252 aa, Oleiphilus sp. HI0009
  MISC_FEATURE (1)..(1252): OspCas12c polypeptide sequence
MTKLRHRQKKLTHDWAGSKKREVLGSNGKLQNPLLMPVKKGQVTEFRKAFSAYARATKGEMTDGRKNMFTHSFEPFKTKPSLHQCELADKAYQSLHSYLPGSLAHFLLSAHALGFRIFSKSGEATAFQASSKIEAYESKLASELACVDLSIQNLTISTLFNALTTSVRGKGEETSADPLIARFYTLLTGKPLSRDTQGPERDLAEVISRKIASSFGTWKEMTANPLQSLQFFEEELHALDANVSLSPAFDVLIKMNDLQGDLKNRTIVFDPDAPVFEYNAEDPADIIIKLTARYAKEAVIKNQNVGNYVKNAITTTNANGLGWLLNKGLSLLPVSTDDELLEFIGVERSHPSCHALIELIAQLEAPELFEKNVFSDTRSEVQGMIDSAVSNHIARLSSSRNSLSMDSEELERLIKSFQIHTPHCSLFIGAQSLSQQLESLPEALQSGVNSADILLGSTQYMLTNSLVEESIATYQRTLNRINYLSGVAGQINGAIKRKAIDGEKIHLPAAWSELISLPFIGQPVIDVESDLAHLKNQYQTLSNEFDTLISALQKNFDLNFNKALLNRTQHFEAMCRSTKKNALSKPEIVSYRDLLARLTSCLYRGSLVLRRAGIEVLKKHKIFESNSELREHVHERKHFVFVSPLDRKAKKLLRLTDSRPDLLHVIDEILQHDNLENKDRESLWLVRSGYLLAGLPDQLSSSFINLPIITQKGDRRLIDLIQYDQINRDAFVMLVTSAFKSNLSGLQYRANKQSFVVTRTLSPYLGSKLVYVPKDKDWLVPSQMFEGRFADILQSDYMVWKDAGRLCVIDTAKHLSNIKKSVFSSEEVLAFLRELPHRTFIQTEVRGLGVNVDGIAFNNGDIPSLKTFSNCVQVKVSRTNTSLVQTLNRWFEGGKVSPPSIQFERAYYKKDDQIHEDAAKRKIRFQMPATELVHASDDAGWTPSYLLGIDPGEYGMGLSLVSINNGEVLDSGFIHINSLINFASKKSNHQTKVVPRQQYKSPYANYLEQSKDSAAGDIAHILDRLIYKLNALPVFEALSGNSQSAADQVWTKVLSFYTWGDNDAQNSIRKQHWFGASHWDIKGMLRQPPTEKKPKPYIAFPGSQVSSYGNSQRCSCCGRNPIEQLREMAKDTSIKELKIRNSEIQLFDGTIKLFNPDPSTVIERRRHNLGPSRIPVADRTFKNISPSSLEFKELITIVSRSIRHSPEFIAKKRGIGSEYFCAYSDCNSSLNSEANAAANVAQKFQKQLFFEL

SEQ ID NO: 242 - protein, 767 aa, Artificial Sequence
  Description of artificial sequence: Cas12g1 polypeptide sequence
MAQASSTPAVSPRPRPRYREERTLVRKLLPRPGQSKQEFRENVKKLRKAFLQFNADVSGVCQWAIQFRPRYGKPAEPTETFWKFFLEPETSLPPNDSRSPEFRRLQAFEAAAGINGAAALDDPAFTNELRDSILAVASRPKTKEAQRLFSRLKDYQPAHRMILAKVAAEWIESRYRRAHQNWERNYEEWKKEKQEWEQNHPELTPEIREAFNQIFQQLEVKEKRVRICPAARLLQNKDNCQYAGKNKHSVLCNQFNEFKKNHLQGKAIKFFYKDAEKYLRCGLQSLKPNVQGPFREDWNKYLRYMNLKEETLRGKNGGRLPHCKNLGQECEFNPHTALCKQYQQQLSSRPDLVQHDELYRKWRREYWREPRKPVFRYPSVKRHSIAKIFGENYFQADFKNSVVGLRLDSMPAGQYLEFAFAPWPRNYRPQPGETEISSVHLHFVGTRPRIGFRFRVPHKRSRFDCTQEELDELRSRTFPRKAQDQKFLEAARKRLLETFPGNAEQELRLLAVDLGTDSARAAFFIGKTFQQAFPLKIVKIEKLYEQWPNQKQAGDRRDASSKQPRPGLSRDHVGRHLQKMRAQASEIAQKRQELTGTPAPETTTDQAAKKATLQPFDLRGLTVHTARMIRDWARLNARQIIQLAEENQVDLIVLESLRGFRPPGYENLDQEKKRRVAFFAHGRIRRKVTEKAVERGMRVVTVPYLASSKVCAECRKKQKDNKQWEKNKKRGLFKCEGCGSQAQVDENAARVLGRVFWGEIELPTAIP

SEQ ID NO: 243 - protein, 870 aa, Artificial Sequence
  Description of artificial sequence: Cas12h1 polypeptide sequence
MKVHEIPRSQLLKIKQYEGSFVEWYRDLQEDRKKFASLLFRWAAFGYAAREDDGATYISPSQALLERRLLLGDAEDVAIKFLDVLFKGGAPSSSCYSLFYEDFALRDKAKYSGAKREFIEGLATMPLDKIIERIRQDEQLSKIPAEEWLILGAEYSPEEIWEQVAPRIVNVDRSLGKQLRERLGIKCRRPHDAGYCKILMEVVARQLRSHNETYHEYLNQTHEMKTKVANNLTNEFDLVCEFAEVLEEKNYGLGWYVLWQGVKQALKEQKKPTKIQIAVDQLRQPKFAGLLTAKWRALKGAYDTWKLKKRLEKRKAFPYMPNWDNDYQIPVGLTGLGVFTLEVKRTEVVVDLKEHGKLFCSHSHYFGDLTAEKHPSRYHLKFRHKLKLRKRDSRVEPTIGPWIEAALREITIQKKPNGVFYLGLPYALSHGIDNFQIAKRFFSAAKPDKEVINGLPSEMVVGAADLNLSNIVAPVKARIGKGLEGPLHALDYGYGELIDGPKILTPDGPRCGELISLKRDIVEIKSAIKEFKACQREGLTMSEETTTWLSEVESPSDSPRCMIQSRIADTSRRLNSFKYQMNKEGYQDLAEALRLLDAMDSYNSLLESYQRMHLSPGEQSPKEAKFDTKRASFRDLLRRRVAHTIVEYFDDCDIVFFEDLDGPSDSDSRNNALVKLLSPRTLLLYIRQALEKRGIGMVEVAKDGTSQNNPISGHVGWRNKQNKSEIYFYEDKELLVMDADEVGAMNILCRGLNHSVCPYSFVTKAPEKKNDEKKEGDYGKRVKRFLKDRYGSSNVRFLVASMGFVTVTTKRPKDALVGKRLYYHGGELVTHDLHNRMKDEIKYLVEKEVLARRVSLSDSTIKSYKSFAHV

SEQ ID NO: 244 - protein, 1093 aa, Artificial Sequence
  Description of artificial sequence: Cas12i1 polypeptide sequence
MSNKEKNASETRKAYTTKMIPRSHDRMKLLGNFMDYLMDGTPIFFELWNQFGGGIDRDIISGTANKDKISDDLLLAVNWFKVMPINSKPQGVSPSNLANLFQQYSGSEPDIQAQEYFASNFDTEKHQWKDMRVEYERLLAELQLSRSDMHHDLKLMYKEKCIGLSLSTAHYITSVMFGTGAKNNRQTKHQFYSKVIQLLEESTQINSVEQLASIILKAGDCDSYRKLRIRCSRKGATPSILKIVQDYELGTNHDDEVNVPSLIANLKEKLGRFEYECEWKCMEKIKAFLASKVGPYYLGSYSAMLENALSPIKGMTTKNCKFVLKQIDAKNDIKYENEPFGKIVEGFFDSPYFESDTNVKWVLHPHHIGESNIKTLWEDLNAIHSKYEEDIASLSEDKKEKRIKVYQGDVCQTINTYCEEVGKEAKTPLVQLLRYLYSRKDDIAVDKIIDGITFLSKKHKVEKQKINPVIQKYPSFNFGNNSKLLGKIISPKDKLKHNLKCNRNQVDNYIWIEIKVLNTKTMRWEKHHYALSSTRFLEEVYYPATSENPPDALAARFRTKTNGYEGKPALSAEQIEQIRSAPVGLRKVKKRQMRLEAARQQNLLPRYTWGKDFNINICKRGNNFEVTLATKVKKKKEKNYKVVLGYDANIVRKNTYAAIEAHANGDGVIDYNDLPVKPIESGFVTVESQVRDKSYDQLSYNGVKLLYCKPHVESRRSFLEKYRNGTMKDNRGNNIQIDFMKDFEAIADDETSLYYFNMKYCKLLQSSIRNHSSQAKEYREEIFELLRDGKLSVLKLSSLSNLSFVMFKVAKSLIGTYFGHLLKKPKNSKSDVKAPPITDEDKQKADPEMFALRLALEEKRLNKVKSKKEVIANKIVAKALELRDKYGPVLIKGENISDTTKKGKKSSTNSFLMDWLARGVANKVKEMVMMHQGLEFVEVNPNFTSHQDPFVHKNPENTFRARYSRCTPSELTEKNRKEILSFLSDKPSKRPTNAYYNEGAMAFLATYGLKKNDVLGVSLEKFKQIMANILHQRSEDQLLFPSRGGMFYLATYKLDADATSVNWNGKQFWVCNADLVAAYNVGLVDIQKDFKKK

SEQ ID NO: 245 - protein, 1054 aa, Artificial Sequence
  Description of artificial sequence: Cas12i2 polypeptide sequence
MSSAIKSYKSVLRPNERKNQLLKSTIQCLEDGSAFFFKMLQGLFGGITPEIVRFSTEQEKQQQDIALWCAVNWFRPVSQDSLTHTIASDNLVEKFEEYYGGTASDAIKQYFSASIGESYYWNDCRQQYYDLCRELGVEVSDLTHDLEILCREKCLAVATESNQNNSIISVLFGTGEKEDRSVKLRITKKILEAISNLKEIPKNVAPIQEIILNVAKATKETFRQVYAGNLGAPSTLEKFIAKDGQKEFDLKKLQTDLKKVIRGKSKERDWCCQEELRSYVEQNTIQYDLWAWGEMFNKAHTALKIKSTRNYNFAKQRLEQFKEIQSLNNLLVVKKLNDFFDSEFFSGEETYTICVHHLGGKDLSKLYKAWEDDPADPENAIVVLCDDLKNNFKKEPIRNILRYIFTIRQECSAQDILAAAKYNQQLDRYKSQKANPSVLGNQGFTWTNAVILPEKAQRNDRPNSLDLRIWLYLKLRHPDGRWKKHHIPFYDTRFFQEIYAAGNSPVDTCQFRTPRFGYHLPKLTDQTAIRVNKKHVKAAKTEARIRLAIQQGTLPVSNLKITEISATINSKGQVRIPVKFDVGRQKGTLQIGDRFCGYDQNQTASHAYSLWEVVKEGQYHKELGCFVRFISSGDIVSITENRGNQFDQLSYEGLAYPQYADWRKKASKFVSLWQITKKNKKKEIVTVEAKEKFDAICKYQPRLYKFNKEYAYLLRDIVRGKSLVELQQIRQEIFRFIEQDCGVTRLGSLSLSTLETVKAVKGIIYSYFSTALNASKNNPISDEQRKEFDPELFALLEKLELIRTRKKKQKVERIANSLIQTCLENNIKFIRGEGDLSTTNNATKKKANSRSMDWLARGVFNKIRQLAPMHNITLFGCGSLYTSHQDPLVHRNPDKAMKCRWAAIPVKDIGDWVLRKLSQNLRAKNIGTGEYYHQGVKEFLSHYELQDLEEELLKWRSDRKSNIPCWVLQNRLAEKLGNKEAVVYIPVRGGRIYFATHKVATGAVSIVFDQKQVWVCNADHVAAANIALTVKGIGEQSSDEENPDGSRIKLQLTS

SEQ ID NO: 246 - protein, 4 aa, Artificial Sequence
  Description of artificial sequence: synthetic peptide sequence
GGGS

SEQ ID NO: 247 - protein, 5 aa, Artificial Sequence
  Description of artificial sequence: synthetic peptide sequence
GGGGS

SEQ ID NO: 248 - protein, 5 aa, Artificial Sequence
  Description of artificial sequence: synthetic peptide sequence
EAAAK

SEQ ID NO: 249 - protein, 16 aa, Artificial Sequence
  Description of artificial sequence: synthetic peptide sequence
SGSETPGTSESATPES

SEQ ID NO: 250 - protein, 6 aa, Artificial Sequence
  Description of artificial sequence: linker peptide sequence
GGSGGS

SEQ ID NO: 251 - protein, 20 aa, Artificial Sequence
  Description of artificial sequence: synthetic peptide sequence
GSSGSETPGTSESATPESSG

SEQ ID NO: 252 - DNA, 18 bp, Artificial Sequence
  Description of artificial sequence: synthetic oligonucleotide sequence
ggaggctctggaggaagc

SEQ ID NO: 253 - DNA, 60 bp, Artificial Sequence
  Description of artificial sequence: synthetic oligonucleotide sequence
ggctcttctggatctgaaacacctggcacaagcgagagcgccacccctgagagctctggc

SEQ ID NO: 254 - protein, 1129 aa, Alicyclobacillus acidiphilus
  MISC_FEATURE (1)..(1129): AacCas12b polypeptide sequence
MAVKSMKVKLRLDNMPEIRAGLWKLHTEVNAGVRYYTEWLSLLRQENLYRRSPNGDGEQECYKTAEECKAELLERLRARQVENGHCGPAGSDDELLQLARQLYELLVPQAIGAKGDAQQIARKFLSPLADKDAVGGLGIAKAGNKPRWVRMREAGEPGWEEEKAKAEARKSTDRTADVLRALADFGLKPLMRVYTDSDMSSVQWKPLRKGQAVRTWDRDMFQQAIERMMSWESWNQRVGEAYAKLVEQKSRFEQKNFVGQEHLVQLVNQLQQDMKEASHGLESKEQTAHYLTGRALRGSDKVFEKWEKLDPDAPFDLYDTEIKNVQRRNTRRFGSHDLFAKLAEPKYQALWREDASFLTRYAVYNSIVRKLNHAKMFATFTLPDATAHPIWTRFDKLGGNLHQYTFLFNEFGEGRHAIRFQKLLTVEDGVAKEVDDVTVPISMSAQLDDLLPRDPHELVALYFQDYGAEQHLAGEFGGAKIQYRRDQLNHLHARRGARDVYLNLSVRVQSQSEARGERRPPYAAVFRLVGDNHRAFVHFDKLSDYLAEHPDDGKLGSEGLLSGLRVMSVDLGLRTSASISVFRVARKDELKPNSEGRVPFCFPIEGNENLVAVHERSQLLKLPGETESKDLRAIREERQRTLRQLRTQLAYLRLLVRCGSEDVGRRERSWAKLIEQPMDANQMTPDWREAFEDELQKLKSLYGICGDREWTEAVYESVRRVWRHMGKQVRDWRKDVRSGERPKIRGYQKDVVGGNSIEQIEYLERQYKFLKSWSFFGKVSGQVIRAEKGSRFAITLREHIDHAKEDRLKKLADRIIMEALGYVYALDDERGKGKWVAKYPPCQLILLEELSEYQFNNDRPPSENNQLMQWSHRGVFQELLNQAQVHDLLVGTMYAAFSSRFDARTGAPGIRCRRVPARCAREQNPEPFPWWLNKFVAEHKLDGCPLRADDLIPTGEGEFFVSPFSAEEGDFHQIHADLNAAQNLQRRLWSDFDISQIRLRCDWGEVDGEPVLIPRTTGKRTADSYGNKVFYTKTGVTYYERERGKKRRKVFAQEELSEEEAELLVEADEAREKSVVLMRDPSGIINRGDWTRQKEFWSMVNQRIEGYLVKQIRSRVRLQESACENTGDI

SEQ ID NO: 255 - protein, 1140 aa, Bacillus hisashii
  MISC_FEATURE (1)..(1140): BhCas12b polypeptide sequence
MAPKKKRKVGIHGVPAAATRSFILKIEPNEEVKKGLWKTHEVLNHGIAYYMNILKLIRQEAIYEHHEQDPKNPKKVSKAEIQAELWDFVLKMQKCNSFTHEVDKDEVFNILRELYEELVPSSVEKKGEANQLSNKFLYPLVDPNSQSGKGTASSGRKPRWYNLKIAGDPSWEEEKKKWEEDKKKDPLAKILGKLAEYGLIPLFIPYTDSNEPIVKEIKWMEKSRNQSVRRLDKDMFIQALERFLSWESWNLKVKEEYEKVEKEYKTLEERIKEDIQALKALEQYEKERQEQLLRDTLNTNEYRLSKRGLRGWREIIQKWLKMDENEPSEKYLEVFKDYQRKHPREAGDYSVYEFLSKKENHFIWRNHPEYPYLYATFCEIDKKKKDAKQQATFTLADPINHPLWVRFEERSGSNLNKYRILTEQLHTEKLKKKLTVQLDRLIYPTESGGWEEKGKVDIVLLPSRQFYNQIFLDIEEKGKHAFTYKDESIKFPLKGTLGGARVQFDRDHLRRYPHKVESGNVGRIYFNMTVNIEPTESPVSKSLKIHRDDFPKVVNFKPKELTEWIKDSKGKKLKSGIESLEIGLRVMSIDLGQRQAAAASIFEVVDQKPDIEGKLFFPIKGTELYAVHRASFNIKLPGETLVKSREVLRKAREDNLKLMNQKLNFLRNVLHFQQFEDITEREKRVTKWISRQENSDVPLVYQDELIQIRELMYKPYKDWVAFLKQLHKRLEVEIGKEVKHWRKSLSDGRKGLYGISLKNIDEIDRTRKFLLRWSLRPTEPGEVRRLEPGQRFAIDQLNHLNALKEDRLKKMANTIIMHALGYCYDVRKKKWQAKNPACQIILFEDLSNYNPYEERSRFENSKLMKWSRREIPRQVALQGEIYGLQVGEVGAQFSSRFHAKTGSPGIRCSVVTKEKLQDNRFFKNLQREGRLTLDKIAVLKEGDLYPDKGGEKFISLSKDRKCVTTHADINAAQNLQKRFWTRTHGFYKVYCKAYQVDGQTVYIPESKDQKQKIIEEFGEGYFILKDGVYEWVNAGKLKIKKGSSKQSSSELVDSDILKDSFDLASELKGEKLMLYRDPSGNVFPSDKWMAAGVFFGKLERILISKLTNQYSISTIEDDSSKQSMKRPAATKKAGQAKKKK

SEQ ID NO: 256 - protein, 1108 aa, Bacillus thermoamylovorans
  MISC_FEATURE (1)..(1108): BTCas12b.BTCas12b polypeptide sequence
MATRSFILKIEPNEEVKKGLWKTHEVLNHGIAYYMNILKLIRQEAIYEHHEQDPKNPKKVSKAEIQAELWDFVLKMQKCNSFTHEVDKDVVFNILRELYEELVPSSVEKKGEANQLSNKFLYPLVDPNSQSGKGTASSGRKPRWYNLKIAGDPSWEEEKKKWEEDKKKDPLAKILGKLAEYGLIPLFIPFTDSNEPIVKEIKWMEKSRNQSVRRLDKDMFIQALERFLSWESWNLKVKEEYEKVEKEHKTLEERIKEDIQAFKSLEQYEKERQEQLLRDTLNTNEYRLSKRGLRGWREIIQKWLKMDENEPSEKYLEVFKDYQRKHPREAGDYSVYEFLSKKENHFIWRNHPEYPYLYATFCEIDKKKKDAKQQATFTLADPINHPLWVRFEERSGSNLNKYRILTEQLHTEKLKKKLTVQLDRLIYPTESGGWEEKGKVDIVLLPSRQFYNQIFLDIEEKGKHAFTYKDESIKFPLKGTLGGARVQFDRDHLRRYPHKVESGNVGRIYFNMTVNIEPTESPVSKSLKIHRDDFPKFVNFKPKELTEWIKDSKGKKLKSGIESLEIGLRVMSIDLGQRQAAAASIFEVVDQKPDIEGKLFFPIKGTELYAVHRASFNIKLPGETLVKSREVLRKAREDNLKLMNQKLNFLRNVLHFQQFEDITEREKRVTKWISRQENSDVPLVYQDELIQIRELMYKPYKDWVAFLKQLHKRLEVEIGKEVKHWRKSLSDGRKGLYGISLKNIDEIDRTRKFLLRWSLRPTEPGEVRRLEPGQRFAIDQLNHLNALKEDRLKKMANTIIMHALGYCYDVRKKKWQAKNPACQIILFEDLSNYNPYEERSRFENSKLMKWSRREIPRQVALQGEIYGLQVGEVGAQFSSRFHAKTGSPGIRCSVVTKEKLQDNRFFKNLQREGRLTLDKIAVLKEGDLYPDKGGEKFISLSKDRKLVTTHADINAAQNLQKRFWTRTHGFYKVYCKAYQVDGQTVYIPESKDQKQKIIEEFGEGYFILKDGVYEWGNAGKLKIKKGSSKQSSSELVDSDILKDSFDLASELKGEKLMLYRDPSGNVFPSDKWMAAGVFFGKLERILISKLTNQYSISTIEDDSSKQSM

SEQ ID NO: 257 - protein, 1112 aa, Bacillus sp. V3-13
  MISC_FEATURE (1)..(1112): BvCas12b (Bacillus sp. V3-13) polypeptide sequence
MAIRSIKLKMKTNSGTDSIYLRKALWRTHQLINEGIAYYMNLLTLYRQEAIGDKTKEAYQAELINIIRNQQRNNGSSEEHGSDQEILALLRQLYELIIPSSIGESGDANQLGNKFLYPLVDPNSQSGKGTSNAGRKPRWKRLKEEGNPDWELEKKKDEERKAKDPTVKIFDNLNKYGLLPLFPLFTNIQKDIEWLPLGKRQSVRKWDKDMFIQAIERLLSWESWNRRVADEYKQLKEKTESYYKEHLTGGEEWIEKIRKFEKERNMELEKNAFAPNDGYFITSRQIRGWDRVYEKWSKLPESASPEELWKVVAEQQNKMSEGFGDPKVFSFLANRENRDIWRGHSERIYHIAAYNGLQKKLSRTKEQATFTLPDAIEHPLWIRYESPGGTNLNLFKLEEKQKKNYYVTLSKIIWPSEEKWIEKENIEIPLAPSIQFNRQIKLKQHVKGKQEISFSDYSSRISLDGVLGGSRIQFNRKYIKNHKELLGEGDIGPVFFNLVVDVAPLQETRNGRLQSPIGKALKVISSDFSKVIDYKPKELMDWMNTGSASNSFGVASLLEGMRVMSIDMGQRTSASVSIFEVVKELPKDQEQKLFYSINDTELFAIHKRSFLLNLPGEVVTKNNKQQRQERRKKRQFVRSQIRMLANVLRLETKKTPDERKKAIHKLMEIVQSYDSWTASQKEVWEKELNLLTNMAAFNDEIWKESLVELHHRIEPYVGQIVSKWRKGLSEGRKNLAGISMWNIDELEDTRRLLISWSKRSRTPGEANRIETDEPFGSSLLQHIQNVKDDRLKQMANLIIMTALGFKYDKEEKDRYKRWKETYPACQIILFENLNRYLFNLDRSRRENSRLMKWAHRSIPRTVSMQGEMFGLQVGDVRSEYSSRFHAKTGAPGIRCHALTEEDLKAGSNTLKRLIEDGFINESELAYLKKGDIIPSQGGELFVTLSKRYKKDSDNNELTVIHADINAAQNLQKRFWQQNSEVYRVPCQLARMGEDKLYIPKSQTETIKKYFGKGSFVKNNTEQEVYKWEKSEKMKIKTDTTFDLQDLDGFEDISKTIELAQEQQKKYLTMFRDPSGYFFNNETWRPQKEYWSIVNNIIKSCLKKKILSNKVEL

SEQ ID NO: 258 - DNA, 47 bp, Artificial Sequence
  Description of artificial sequence: 5'UTR oligonucleotide sequence
gggaaataagagagaaaagaagagtaagaagaaatataagagccacc

SEQ ID NO: 259 - DNA, 101 bp, Artificial Sequence
  Description of artificial sequence: 3'UTR (TriLink standard UTR) polynucleotide sequence
gctggagcctcggtggccatgcttcttgccccttgggcctccccccagcccctcctccccttcctgcacccgtacccccgtggtctttgaataaagtctga

SEQ ID NO: 260 - DNA, 3420 bp, Bacillus hisashii
  misc_feature (1)..(3420): bhCas12b (V4) polynucleotide sequence
atggccccaaagaagaagcggaaggtcggtatccacggagtcccagcagccgccaccagatccttcatcctgaagatcgagcccaacgaggaagtgaagaaaggcctctggaaaacccacgaggtgctgaaccacggaatcgcctactacatgaatatcctgaagctgatccggcaagaggccatctacgagcaccacgagcaggaccccaagaatcccaagaaggtgtccaaggccgagatccaggccgagctgtgggatttcgtgctgaagatgcagaagtgcaacagcttcacacacgaggtggacaaggacgaggtgttcaacatcctgagagagctgtacgaggaactggtgcccagcagcgtggaaaagaagggcgaagccaaccagctgagcaacaagtttctgtaccctctggtggaccccaacagccagtctggaaagggaacagccagcagcggcagaaagcccagatggtacaacctgaagattgccggcgatccctcctgggaagaagagaagaagaagtgggaagaagataagaaaaaggacccgctggccaagatcctgggcaagctggctgagtacggactgatccctctgttcatcccctacaccgacagcaacgagcccatcgtgaaagaaatcaagtggatggaaaagtcccggaaccagagcgtgcggcggctggataaggacatgttcattcaggccctggaacggttcctgagctgggagagctggaacctgaaagtgaaagaggaatacgagaaggtcgagaaagagtacaagaccctggaagagaggatcaaagaggacatccaggctctgaaggctctggaacagtatgagaaagagcggcaagaacagctgctgcgggacaccctgaacaccaacgagtaccggctgagcaagagaggccttagaggctggcgggaaatcatccagaaatggctgaaaatggacgagaacgagccctccgagaagtacctggaagtgttcaaggactaccagcggaagcaccctagagaggccggcgattacagcgtgtacgagttcctgtccaagaaagagaaccacttcatctggcggaatcaccctgagtacccctacctgtacgccaccttctgcgagatcgacaagaaaaagaaggacgccaagcagcaggccaccttcacactggccgatcctatcaatcaccctctgtgggtccgattcgaggaaagaagcggcagcaacctgaacaagtacagaatcctgaccgagcagctgcacaccgagaagctgaagaaaaagctgacagtgcagctggaccggctgatctaccctacagaatctggcggctgggaagagaagggcaaagtggacattgtgctgctgcccagccggcagttctacaaccagatcttcctggacatcgaggaaaagggcaagcacgccttcacctacaaggatgagagcatcaagttccctctgaagggcacactcggcggagccagagtgcagttcgacagagatcacctgagaagataccctcacaaggtggaaagcggcaacgtgggcagaatctacttcaacatgaccgtgaacatcgagcctacagagtccccagtgtccaagtctctgaagatccaccgggacgacttccccaaggtggtcaacttcaagcccaaagaactgaccgagtggatcaaggacagcaagggcaagaaactgaagtccggcatcgagtccctggaaatcggcctgagagtgatgagcatcgacctgggacagagacaggccgctgccgcctctattttcgaggtggtggatcagaagcccgacatcgaaggcaagctgtttttcccaatcaagggcaccgagctgtatgccgtgcacagagccagcttcaacatcaagctgcccggcgagacactggtcaagagcagagaagtgctgcggaaggccagagaggacaatctgaaactgatgaaccagaagctcaacttcctgcggaacgtgctgcacttccagcagttcgaggacatcaccgagagagagaagcgggtcaccaagtggatcagcagacaagagaacagcgacgtgcccctggtgtaccaggatgagctgatccagatccgcgagctgatgtacaagccttacaaggactgggtcgccttcctgaagcagctccacaagagactggaagtcgagatcggcaaagaagtgaagcactggcggaagtccctgagcgacggaagaaagggcctgtacggcatctccctgaagaacatcgacgagatcgatcggacccggaagttcctgctgagatggtccctgaggcctaccgaacctggcgaagtgcgtagactggaacccggccagagattcgccatcgaccagctgaatcacctgaacgccctgaaagaagatcggctgaagaagatggccaacaccatcatcatgcacgccctgggctactgctacgacgtgcggaagaagaaatggcaggctaagaaccccgcctgccagatcatcctgttcgaggatctgagcaactacaacccctacgaggaaaggtcccgcttcgagaacagcaagctcatgaagtggtccagacgcgagatccccagacaggttgcactgcagggcgagatctatggcctgcaagtgggagaagtgggcgctcagttcagcagcagattccacgccaagacaggcagccctggcatcagatgtagcgtcgtgaccaaagagaagctgcaggacaatcggttcttcaagaatctgcagagagagggcagactgaccctggacaaaatcgccgtgctgaaagagggcgatctgtacccagacaaaggcggcgagaagttcatcagcctgagcaaggatcggaagtgcgtgaccacacacgccgacatcaacgccgctcagaacctgcagaagcggttctggacaagaacccacggcttctacaaggtgtactgcaaggcctaccaggtggacggccagaccgtgtacatccctgagagcaaggaccagaagcagaagatcatcgaagagttcggcgagggctacttcattctgaaggacggggtgtacgaatgggtcaacgccggcaagctgaaaatcaagaagggcagctccaagcagagcagcagcgagctggtggatagcgacatcctgaaagacagcttcgacctggcctccgagctgaaaggcgaaaagctgatgctgtacagggaccccagcggcaatgtgttccccagcgacaaatggatggccgctggcgtgttcttcggaaagctggaacgcatcctgatcagcaagctgaccaaccagtactccatcagcaccatcgaggacgacagcagcaagcagtctatgaaaaggccggcggccacgaaaaaggccggccaggcaaaaaagaaaaag

SEQ ID NO: 261 - protein, 17 aa, Artificial Sequence
  Description of artificial sequence: synthetic peptide sequence
MAPKKKRKVGIHGVPAA

SEQ ID NO: 262 - DNA, 51 bp, Artificial Sequence
  Description of artificial sequence: synthetic oligonucleotide sequence
atggccccaaagaagaagcggaaggtcggtatccacggagtcccagcagcc

SEQ ID NO: 263 - protein, 1554 aa, Artificial Sequence
  Description of artificial sequence: 101 Cas9 TadAins 1015 polypeptide sequence
MDKKYSIGLAIGTNSVGWAVITDEYKVPSKKFKVLGNTDRHSIKKNLIGALLFDSGETAEATRLKRTARRRYTRRKNRICYLQEIFSNEMAKVDDSFFHRLEESFLVEEDKKHERHPIFGNIVDEVAYHEKYPTIYHLRKKLVDSTDKADLRLIYLALAHMIKFRGHFLIEGDLNPDNSDVDKLFIQLVQTYNQLFEENPINASGVDAKAILSARLSKSRRLENLIAQLPGEKKNGLFGNLIALSLGLTPNFKSNFDLAEDAKLQLSKDTYDDDLDNLLAQIGDQYADLFLAAKNLSDAILLSDILRVNTEITKAPLSASMIKRYDEHHQDLTLLKALVRQQLPEKYKEIFFDQSKNGYAGYIDGGASQEEFYKFIKPILEKMDGTEELLVKLNREDLLRKQRTFDNGSIPHQIHLGELHAILRRQEDFYPFLKDNREKIEKILTFRIPYYVGPLARGNSRFAWMTRKSEETITPWNFEEVVDKGASAQSFIERMTNFDKNLPNEKVLPKHSLLYEYFTVYNELTKVKYVTEGMRKPAFLSGEQKKAIVDLLFKTNRKVTVKQLKEDYFKKIECFDSVEISGVEDRFNASLGTYHDLLKIIKDKDFLDNEENEDILEDIVLTLTLFEDREMIEERLKTYAHLFDDKVMKQLKRRRYTGWGRLSRKLINGIRDKQSGKTILDFLKSDGFANRNFMQLIHDDSLTFKEDIQKAQVSGQGDSLHEHIANLAGSPAIKKGILQTVKVVDELVKVMGRHKPENIVIEMARENQTTQKGQKNSRERMKRIEEGIKELGSQILKEHPVENTQLQNEKLYLYYLQNGRDMYVDQELDINRLSDYDVDHIVPQSFLKDDSIDNKVLTRSDKNRGKSDNVPSEEVVKKMKNYWRQLLNAKLITQRKFDNLTKAERGGLSELDKAGFIKRQLVETRQITKHVAQILDSRMNTKYDENDKLIREVKVITLKSKLVSDFRKDFQFYKVREINNYHHAHDAYLNAVVGTALIKKYPKLESEFVYGDYKVGSSGSETPGTSESATPESSGSEVEFSHEYWMRHALTLAKRARDEREVPVGAVLVLNNRVIGEGWNRAIGLHDPTAHAEIMALRQGGLVMQNYRLIDATLYVTFEPCVMCAGAMIHSRIGRVVFGVRNAKTGAAGSLMDVLHYPGMNHRVEITEGILADECAALLCYFFRMPRQVFNAQKKAQSSTDYDVRKMIAKSEQEIGKATAKYFFYSNIMNFFKTEITLANGEIRKRPLIETNGETGEIVWDKGRDFATVRKVLSMPQVNIVKKTEVQTGGFSKESILPKRNSDKLIARKKDWDPKKYGGFDSPTVAYSVLVVAKVEKGKSKKLKSVKELLGITIMERSSFEKNPIDFLEAKGYKEVKKDLIIKLPKYSLFELENGRKRMLASAGELQKGNELALPSKYVNFLYLASHYEKLKGSPEDNEQKQLFVEQHKHYLDEIIEQISEFSKRVILADANLDKVLSAYNKHRDKPIREQAENIIHLFTLTNLGAPAAFKYFDTTIDRKRYTSTKEVLDATLIHQSITGLYETRIDLSQLGGD

SEQ ID NO: 264 - protein, 1554 aa, Artificial Sequence
  Description of artificial sequence: 102 Cas9 TadAins 1022 polypeptide sequence
MDKKYSIGLAIGTNSVGWAVITDEYKVPSKKFKVLGNTDRHSIKKNLIGALLFDSGETAEATRLKRTARRRYTRRKNRICYLQEIFSNEMAKVDDSFFHRLEESFLVEEDKKHERHPIFGNIVDEVAYHEKYPTIYHLRKKLVDSTDKADLRLIYLALAHMIKFRGHFLIEGDLNPDNSDVDKLFIQLVQTYNQLFEENPINASGVDAKAILSARLSKSRRLENLIAQLPGEKKNGLFGNLIALSLGLTPNFKSNFDLAEDAKLQLSKDTYDDDLDNLLAQIGDQYADLFLAAKNLSDAILLSDILRVNTEITKAPLSASMIKRYDEHHQDLTLLKALVRQQLPEKYKEIFFDQSKNGYAGYIDGGASQEEFYKFIKPILEKMDGTEELLVKLNREDLLRKQRTFDNGSIPHQIHLGELHAILRRQEDFYPFLKDNREKIEKILTFRIPYYVGPLARGNSRFAWMTRKSEETITPWNFEEVVDKGASAQSFIERMTNFDKNLPNEKVLPKHSLLYEYFTVYNELTKVKYVTEGMRKPAFLSGEQKKAIVDLLFKTNRKVTVKQLKEDYFKKIECFDSVEISGVEDRFNASLGTYHDLLKIIKDKDFLDNEENEDILEDIVLTLTLFEDREMIEERLKTYAHLFDDKVMKQLKRRRYTGWGRLSRKLINGIRDKQSGKTILDFLKSDGFANRNFMQLIHDDSLTFKEDIQKAQVSGQGDSLHEHIANLAGSPAIKKGILQTVKVVDELVKVMGRHKPENIVIEMARENQTTQKGQKNSRERMKRIEEGIKELGSQILKEHPVENTQLQNEKLYLYYLQNGRDMYVDQELDINRLSDYDVDHIVPQSFLKDDSIDNKVLTRSDKNRGKSDNVPSEEVVKKMKNYWRQLLNAKLITQRKFDNLTKAERGGLSELDKAGFIKRQLVETRQITKHVAQILDSRMNTKYDENDKLIREVKVITLKSKLVSDFRKDFQFYKVREINNYHHAHDAYLNAVVGTALIKKYPKLESEFVYGDYKVYDVRKMIGSSGSETPGTSESATPESSGSEVEFSHEYWMRHALTLAKRARDEREVPVGAVLVLNNRVIGEGWNRAIGLHDPTAHAEIMALRQGGLVMQNYRLIDATLYVTFEPCVMCAGAMIHSRIGRVVFGVRNAKTGAAGSLMDVLHYPGMNHRVEITEGILADECAALLCYFFRMPRQVFNAQKKAQSSTDAKSEQEIGKATAKYFFYSNIMNFFKTEITLANGEIRKRPLIETNGETGEIVWDKGRDFATVRKVLSMPQVNIVKKTEVQTGGFSKESILPKRNSDKLIARKKDWDPKKYGGFDSPTVAYSVLVVAKVEKGKSKKLKSVKELLGITIMERSSFEKNPIDFLEAKGYKEVKKDLIIKLPKYSLFELENGRKRMLASAGELQKGNELALPSKYVNFLYLASHYEKLKGSPEDNEQKQLFVEQHKHYLDEIIEQISEFSKRVILADANLDKVLSAYNKHRDKPIREQAENIIHLFTLTNLGAPAAFKYFDTTIDRKRYTSTKEVLDATLIHQSITGLYETRIDLSQLGGD

SEQ ID NO: 265 - protein, 1554 aa, Artificial Sequence
  Description of artificial sequence: 103 Cas9 TadAins 1029 polypeptide sequence
MDKKYSIGLAIGTNSVGWAVITDEYKVPSKKFKVLGNTDRHSIKKNLIGALLFDSGETAEATRLKRTARRRYTRRKNRICYLQEIFSNEMAKVDDSFFHRLEESFLVEEDKKHERHPIFGNIVDEVAYHEKYPTIYHLRKKLVDSTDKADLRLIYLALAHMIKFRGHFLIEGDLNPDNSDVDKLFIQLVQTYNQLFEENPINASGVDAKAILSARLSKSRRLENLIAQLPGEKKNGLFGNLIALSLGLTPNFKSNFDLAEDAKLQLSKDTYDDDLDNLLAQIGDQYADLFLAAKNLSDAILLSDILRVNTEITKAPLSASMIKRYDEHHQDLTLLKALVRQQLPEKYKEIFFDQSKNGYAGYIDGGASQEEFYKFIKPILEKMDGTEELLVKLNREDLLRKQRTFDNGSIPHQIHLGELHAILRRQEDFYPFLKDNREKIEKILTFRIPYYVGPLARGNSRFAWMTRKSEETITPWNFEEVVDKGASAQSFIERMTNFDKNLPNEKVLPKHSLLYEYFTVYNELTKVKYVTEGMRKPAFLSGEQKKAIVDLLFKTNRKVTVKQLKEDYFKKIECFDSVEISGVEDRFNASLGTYHDLLKIIKDKDFLDNEENEDILEDIVLTLTLFEDREMIEERLKTYAHLFDDKVMKQLKRRRYTGWGRLSRKLINGIRDKQSGKTILDFLKSDGFANRNFMQLIHDDSLTFKEDIQKAQVSGQGDSLHEHIANLAGSPAIKKGILQTVKVVDELVKVMGRHKPENIVIEMARENQTTQKGQKNSRERMKRIEEGIKELGSQILKEHPVENTQLQNEKLYLYYLQNGRDMYVDQELDINRLSDYDVDHIVPQSFLKDDSIDNKVLTRSDKNRGKSDNVPSEEVVKKMKNYWRQLLNAKLITQRKFDNLTKAERGGLSELDKAGFIKRQLVETRQITKHVAQILDSRMNTKYDENDKLIREVKVITLKSKLVSDFRKDFQFYKVREINNYHHAHDAYLNAVVGTALIKKYPKLESEFVYGDYKVYDVRKMIAKSEQEIGSSGSETPGTSESATPESSGSEVEFSHEYWMRHALTLAKRARDEREVPVGAVLVLNNRVIGEGWNRAIGLHDPTAHAEIMALRQGGLVMQNYRLIDATLYVTFEPCVMCAGAMIHSRIGRVVFGVRNAKTGAAGSLMDVLHYPGMNHRVEITEGILADECAALLCYFFRMPRQVFNAQKKAQSSTDGKATAKYFFYSNIMNFFKTEITLANGEIRKRPLIETNGETGEIVWDKGRDFATVRKVLSMPQVNIVKKTEVQTGGFSKESILPKRNSDKLIARKKDWDPKKYGGFDSPTVAYSVLVVAKVEKGKSKKLKSVKELLGITIMERSSFEKNPIDFLEAKGYKEVKKDLIIKLPKYSLFELENGRKRMLASAGELQKGNELALPSKYVNFLYLASHYEKLKGSPEDNEQKQLFVEQHKHYLDEIIEQISEFSKRVILADANLDKVLSAYNKHRDKPIREQAENIIHLFTLTNLGAPAAFKYFDTTIDRKRYTSTKEVLDATLIHQSITGLYETRIDLSQLGGD

SEQ ID NO: 266 - protein, 1554 aa, Artificial Sequence
  Description of artificial sequence: 103 Cas9 TadAins 1040 polypeptide sequence
MDKKYSIGLAIGTNSVGWAVITDEYKVPSKKFKVLGNTDRHSIKKNLIGALLFDSGETAEATRLKRTARRRYTRRKNRICYLQEIFSNEMAKVDDSFFHRLEESFLVEEDKKHERHPIFGNIVDEVAYHEKYPTIYHLRKKLVDSTDKADLRLIYLALAHMIKFRGHFLIEGDLNPDNSDVDKLFIQLVQTYNQLFEENPINASGVDAKAILSARLSKSRRLENLIAQLPGEKKNGLFGNLIALSLGLTPNFKSNFDLAEDAKLQLSKDTYDDDLDNLLAQIGDQYADLFLAAKNLSDAILLSDILRVNTEITKAPLSASMIKRYDEHHQDLTLLKALVRQQLPEKYKEIFFDQSKNGYAGYIDGGASQEEFYKFIKPILEKMDGTEELLVKLNREDLLRKQRTFDNGSIPHQIHLGELHAILRRQEDFYPFLKDNREKIEKILTFRIPYYVGPLARGNSRFAWMTRKSEETITPWNFEEVVDKGASAQSFIERMTNFDKNLPNEKVLPKHSLLYEYFTVYNELTKVKYVTEGMRKPAFLSGEQKKAIVDLLFKTNRKVTVKQLKEDYFKKIECFDSVEISGVEDRFNASLGTYHDLLKIIKDKDFLDNEENEDILEDIVLTLTLFEDREMIEERLKTYAHLFDDKVMKQLKRRRYTGWGRLSRKLINGIRDKQSGKTILDFLKSDGFANRNFMQLIHDDSLTFKEDIQKAQVSGQGDSLHEHIANLAGSPAIKKGILQTVKVVDELVKVMGRHKPENIVIEMARENQTTQKGQKNSRERMKRIEEGIKELGSQILKEHPVENTQLQNEKLYLYYLQNGRDMYVDQELDINRLSDYDVDHIVPQSFLKDDSIDNKVLTRSDKNRGKSDNVPSEEVVKKMKNYWRQLLNAKLITQRKFDNLTKAERGGLSELDKAGFIKRQLVETRQITKHVAQILDSRMNTKYDENDKLIREVKVITLKSKLVSDFRKDFQFYKVREINNYHHAHDAYLNAVVGTALIKKYPKLESEFVYGDYKVYDVRKMIAKSEQEIGKATAKYFFYSGSSGSETPGTSESATPESSGSEVEFSHEYWMRHALTLAKRARDEREVPVGAVLVLNNRVIGEGWNRAIGLHDPTAHAEIMALRQGGLVMQNYRLIDATLYVTFEPCVMCAGAMIHSRIGRVVFGVRNAKTGAAGSLMDVLHYPGMNHRVEITEGILADECAALLCYFFRMPRQVFNAQKKAQSSTDNIMNFFKTEITLANGEIRKRPLIETNGETGEIVWDKGRDFATVRKVLSMPQVNIVKKTEVQTGGFSKESILPKRNSDKLIARKKDWDPKKYGGFDSPTVAYSVLVVAKVEKGKSKKLKSVKELLGITIMERSSFEKNPIDFLEAKGYKEVKKDLIIKLPKYSLFELENGRKRMLASAGELQKGNELALPSKYVNFLYLASHYEKLKGSPEDNEQKQLFVEQHKHYLDEIIEQISEFSKRVILADANLDKVLSAYNKHRDKPIREQAENIIHLFTLTNLGAPAAFKYFDTTIDRKRYTSTKEVLDATLIHQSITGLYETRIDLSQLGGD

SEQ ID NO: 267 - protein, 1554 aa, Artificial Sequence
  Description of artificial sequence: 105 Cas9 TadAins 1068 polypeptide sequence
MDKKYSIGLAIGTNSVGWAVITDEYKVPSKKFKVLGNTDRHSIKKNLIGALLFDSGETAEATRLKRTARRRYTRRKNRICYLQEIFSNEMAKVDDSFFHRLEESFLVEEDKKHERHPIFGNIVDEVAYHEKYPTIYHLRKKLVDSTDKADLRLIYLALAHMIKFRGHFLIEGDLNPDNSDVDKLFIQLVQTYNQLFEENPINASGVDAKAILSARLSKSRRLENLIAQLPGEKKNGLFGNLIALSLGLTPNFKSNFDLAEDAKLQLSKDTYDDDLDNLLAQIGDQYADLFLAAKNLSDAILLSDILRVNTEITKAPLSASMIKRYDEHHQDLTLLKALVRQQLPEKYKEIFFDQSKNGYAGYIDGGASQEEFYKFIKPILEKMDGTEELLVKLNREDLLRKQRTFDNGSIPHQIHLGELHAILRRQEDFYPFLKDNREKIEKILTFRIPYYVGPLARGNSRFAWMTRKSEETITPWNFEEVVDKGASAQSFIERMTNFDKNLPNEKVLPKHSLLYEYFTVYNELTKVKYVTEGMRKPAFLSGEQKKAIVDLLFKTNRKVTVKQLKEDYFKKIECFDSVEISGVEDRFNASLGTYHDLLKIIKDKDFLDNEENEDILEDIVLTLTLFEDREMIEERLKTYAHLFDDKVMKQLKRRRYTGWGRLSRKLINGIRDKQSGKTILDFLKSDGFANRNFMQLIHDDSLTFKEDIQKAQVSGQGDSLHEHIANLAGSPAIKKGILQTVKVVDELVKVMGRHKPENIVIEMARENQTTQKGQKNSRERMKRIEEGIKELGSQILKEHPVENTQLQNEKLYLYYLQNGRDMYVDQELDINRLSDYDVDHIVPQSFLKDDSIDNKVLTRSDKNRGKSDNVPSEEVVKKMKNYWRQLLNAKLITQRKFDNLTKAERGGLSELDKAGFIKRQLVETRQITKHVAQILDSRMNTKYDENDKLIREVKVITLKSKLVSDFRKDFQFYKVREINNYHHAHDAYLNAVVGTALIKKYPKLESEFVYGDYKVYDVRKMIAKSEQEIGKATAKYFFYSNIMNFFKTEITLANGEIRKRPLIETNGEGSSGSETPGTSESATPESSGSEVEFSHEYWMRHALTLAKRARDEREVPVGAVLVLNNRVIGEGWNRAIGLHDPTAHAEIMALRQGGLVMQNYRLIDATLYVTFEPCVMCAGAMIHSRIGRVVFGVRNAKTGAAGSLMDVLHYPGMNHRVEITEGILADECAALLCYFFRMPRQVFNAQKKAQSSTDTGEIVWDKGRDFATVRKVLSMPQVNIVKKTEVQTGGFSKESILPKRNSDKLIARKKDWDPKKYGGFDSPTVAYSVLVVAKVEKGKSKKLKSVKELLGITIMERSSFEKNPIDFLEAKGYKEVKKDLIIKLPKYSLFELENGRKRMLASAGELQKGNELALPSKYVNFLYLASHYEKLKGSPEDNEQKQLFVEQHKHYLDEIIEQISEFSKRVILADANLDKVLSAYNKHRDKPIREQAENIIHLFTLTNLGAPAAFKYFDTTIDRKRYTSTKEVLDATLIHQSITGLYETRIDLSQLGGD

SEQ ID NO: 268 - protein, 1554 aa, Artificial Sequence
  Description of artificial sequence: 106 Cas9 TadAins 1247 polypeptide sequence
MDKKYSIGLAIGTNSVGWAVITDEYKVPSKKFKVLGNTDRHSIKKNLIGALLFDSGETAEATRLKRTARRRYTRRKNRICYLQEIFSNEMAKVDDSFFHRLEESFLVEEDKKHERHPIFGNIVDEVAYHEKYPTIYHLRKKLVDSTDKADLRLIYLALAHMIKFRGHFLIEGDLNPDNSDVDKLFIQLVQTYNQLFEENPINASGVDAKAILSARLSKSRRLENLIAQLPGEKKNGLFGNLIALSLGLTPNFKSNFDLAEDAKLQLSKDTYDDDLDNLLAQIGDQYADLFLAAKNLSDAILLSDILRVNTEITKAPLSASMIKRYDEHHQDLTLLKALVRQQLPEKYKEIFFDQSKNGYAGYIDGGASQEEFYKFIKPILEKMDGTEELLVKLNREDLLRKQRTFDNGSIPHQIHLGELHAILRRQEDFYPFLKDNREKIEKILTFRIPYYVGPLARGNSRFAWMTRKSEETITPWNFEEVVDKGASAQSFIERMTNFDKNLPNEKVLPKHSLLYEYFTVYNELTKVKYVTEGMRKPAFLSGEQKKAIVDLLFKTNRKVTVKQLKEDYFKKIECFDSVEISGVEDRFNASLGTYHDLLKIIKDKDFLDNEENEDILEDIVLTLTLFEDREMIEERLKTYAHLFDDKVMKQLKRRRYTGWGRLSRKLINGIRDKQSGKTILDFLKSDGFANRNFMQLIHDDSLTFKEDIQKAQVSGQGDSLHEHIANLAGSPAIKKGILQTVKVVDELVKVMGRHKPENIVIEMARENQTTQKGQKNSRERMKRIEEGIKELGSQILKEHPVENTQLQNEKLYLYYLQNGRDMYVDQELDINRLSDYDVDHIVPQSFLKDDSIDNKVLTRSDKNRGKSDNVPSEEVVKKMKNYWRQLLNAKLITQRKFDNLTKAERGGLSELDKAGFIKRQLVETRQITKHVAQILDSRMNTKYDENDKLIREVKVITLKSKLVSDFRKDFQFYKVREINNYHHAHDAYLNAVVGTALIKKYPKLESEFVYGDYKVYDVRKMIAKSEQEIGKATAKYFFYSNIMNFFKTEITLANGEIRKRPLIETNGETGEIVWDKGRDFATVRKVLSMPQVNIVKKTEVQTGGFSKESILPKRNSDKLIARKKDWDPKKYGGFDSPTVAYSVLVVAKVEKGKSKKLKSVKELLGITIMERSSFEKNPIDFLEAKGYKEVKKDLIIKLPKYSLFELENGRKRMLASAGELQKGNELALPSKYVNFLYLASHYEKLKGGSSGSETPGTSESATPESSGSEVEFSHEYWMRHALTLAKRARDEREVPVGAVLVLNNRVIGEGWNRAIGLHDPTAHAEIMALRQGGLVMQNYRLIDATLYVTFEPCVMCAGAMIHSRIGRVVFGVRNAKTGAAGSLMDVLHYPGMNHRVEITEGILADECAALLCYFFRMPRQVFNAQKKAQSSTDSPEDNEQKQLFVEQHKHYLDEIIEQISEFSKRVILADANLDKVLSAYNKHRDKPIREQAENIIHLFTLTNLGAPAAFKYFDTTIDRKRYTSTKEVLDATLIHQSITGLYETRIDLSQLGGD

SEQ ID NO: 269 - protein, 1554 aa, Artificial Sequence
  Description of artificial sequence: 107 Cas9 TadAins 1054 polypeptide sequence
MDKKYSIGLAIGTNSVGWAVITDEYKVPSKKFKVLGNTDRHSIKKNLIGALLFDSGETAEATRLKRTARRRYTRRKNRICYLQEIFSNEMAKVDDSFFHRLEESFLVEEDKKHERHPIFGNIVDEVAYHEKYPTIYHLRKKLVDSTDKADLRLIYLALAHMIKFRGHFLIEGDLNPDNSDVDKLFIQLVQTYNQLFEENPINASGVDAKAILSARLSKSRRLENLIAQLPGEKKNGLFGNLIALSLGLTPNFKSNFDLAEDAKLQLSKDTYDDDLDNLLAQIGDQYADLFLAAKNLSDAILLSDILRVNTEITKAPLSASMIKRYDEHHQDLTLLKALVRQQLPEKYKEIFFDQSKNGYAGYIDGGASQEEFYKFIKPILEKMDGTEELLVKLNREDLLRKQRTFDNGSIPHQIHLGELHAILRRQEDFYPFLKDNREKIEKILTFRIPYYVGPLARGNSRFAWMTRKSEETITPWNFEEVVDKGASAQSFIERMTNFDKNLPNEKVLPKHSLLYEYFTVYNELTKVKYVTEGMRKPAFLSGEQKKAIVDLLFKTNRKVTVKQLKEDYFKKIECFDSVEISGVEDRFNASLGTYHDLLKIIKDKDFLDNEENEDILEDIVLTLTLFEDREMIEERLKTYAHLFDDKVMKQLKRRRYTGWGRLSRKLINGIRDKQSGKTILDFLKSDGFANRNFMQLIHDDSLTFKEDIQKAQVSGQGDSLHEHIANLAGSPAIKKGILQTVKVVDELVKVMGRHKPENIVIEMARENQTTQKGQKNSRERMKRIEEGIKELGSQILKEHPVENTQLQNEKLYLYYLQNGRDMYVDQELDINRLSDYDVDHIVPQSFLKDDSIDNKVLTRSDKNRGKSDNVPSEEVVKKMKNYWRQLLNAKLITQRKFDNLTKAERGGLSELDKAGFIKRQLVETRQITKHVAQILDSRMNTKYDENDKLIREVKVITLKSKLVSDFRKDFQFYKVREINNYHHAHDAYLNAVVGTALIKKYPKLESEFVYGDYKVYDVRKMIAKSEQEIGKATAKYFFYSNIMNFFKTEITLANGSSGSETPGTSESATPESSGSEVEFSHEYWMRHALTLAKRARDEREVPVGAVLVLNNRVIGEGWNRAIGLHDPTAHAEIMALRQGGLVMQNYRLIDATLYVTFEPCVMCAGAMIHSRIGRVVFGVRNAKTGAAGSLMDVLHYPGMNHRVEITEGILADECAALLCYFFRMPRQVFNAQKKAQSSTDGEIRKRPLIETNGETGEIVWDKGRDFATVRKVLSMPQVNIVKKTEVQTGGFSKESILPKRNSDKLIARKKDWDPKKYGGFDSPTVAYSVLVVAKVEKGKSKKLKSVKELLGITIMERSSFEKNPIDFLEAKGYKEVKKDLIIKLPKYSLFELENGRKRMLASAGELQKGNELALPSKYVNFLYLASHYEKLKGSPEDNEQKQLFVEQHKHYLDEIIEQISEFSKRVILADANLDKVLSAYNKHRDKPIREQAENIIHLFTLTNLGAPAAFKYFDTTIDRKRYTSTKEVLDATLIHQSITGLYETRIDLSQLGGD

SEQ ID NO: 270 - protein, 1554 aa, Artificial Sequence
  Description of artificial sequence: 108 Cas9 TadAins 1026 polypeptide sequence
MDKKYSIGLAIGTNSVGWAVITDEYKVPSKKFKVLGNTDRHSIKKNLIGALLFDSGETAEATRLKRTARRRYTRRKNRICYLQEIFSNEMAKVDDSFFHRLEESFLVEEDKKHERHPIFGNIVDEVAYHEKYPTIYHLRKKLVDSTDKADLRLIYLALAHMIKFRGHFLIEGDLNPDNSDVDKLFIQLVQTYNQLFEENPINASGVDAKAILSARLSKSRRLENLIAQLPGEKKNGLFGNLIALSLGLTPNFKSNFDLAEDAKLQLSKDTYDDDLDNLLAQIGDQYADLFLAAKNLSDAILLSDILRVNTEITKAPLSASMIKRYDEHHQDLTLLKALVRQQLPEKYKEIFFDQSKNGYAGYIDGGASQEEFYKFIKPILEKMDGTEELLVKLNREDLLRKQRTFDNGSIPHQIHLGELHAILRRQEDFYPFLKDNREKIEKILTFRIPYYVGPLARGNSRFAWMTRKSEETITPWNFEEVVDKGASAQSFIERMTNFDKNLPNEKVLPKHSLLYEYFTVYNELTKVKYVTEGMRKPAFLSGEQKKAIVDLLFKTNRKVTVKQLKEDYFKKIECFDSVEISGVEDRFNASLGTYHDLLKIIKDKDFLDNEENEDILEDIVLTLTLFEDREMIEERLKTYAHLFDDKVMKQLKRRRYTGWGRLSRKLINGIRDKQSGKTILDFLKSDGFANRNFMQLIHDDSLTFKEDIQKAQVSGQGDSLHEHIANLAGSPAIKKGILQTVKVVDELVKVMGRHKPENIVIEMARENQTTQKGQKNSRERMKRIEEGIKELGSQILKEHPVENTQLQNEKLYLYYLQNGRDMYVDQELDINRLSDYDVDHIVPQSFLKDDSIDNKVLTRSDKNRGKSDNVPSEEVVKKMKNYWRQLLNAKLITQRKFDNLTKAERGGLSELDKAGFIKRQLVETRQITKHVAQILDSRMNTKYDENDKLIREVKVITLKSKLVSDFRKDFQFYKVREINNYHHAHDAYLNAVVGTALIKKYPKLESEFVYGDYKVYDVRKMIAKSEGSSGSETPGTSESATPESSGSEVEFSHEYWMRHALTLAKRARDEREVPVGAVLVLNNRVIGEGWNRAIGLHDPTAHAEIMALRQGGLVMQNYRLIDATLYVTFEPCVMCAGAMIHSRIGRVVFGVRNAKTGAAGSLMDVLHYPGMNHRVEITEGILADECAALLCYFFRMPRQVFNAQKKAQSSTDQEIGKATAKYFFYSNIMNFFKTEITLANGEIRKRPLIETNGETGEIVWDKGRDFATVRKVLSMPQVNIVKKTEVQTGGFSKESILPKRNSDKLIARKKDWDPKKYGGFDSPTVAYSVLVVAKVEKGKSKKLKSVKELLGITIMERSSFEKNPIDFLEAKGYKEVKKDLIIKLPKYSLFELENGRKRMLASAGELQKGNELALPSKYVNFLYLASHYEKLKGSPEDNEQKQLFVEQHKHYLDEIIEQISEFSKRVILADANLDKVLSAYNKHRDKPIREQAENIIHLFTLTNLGAPAAFKYFDTTIDRKRYTSTKEVLDATLIHQSITGLYETRIDLSQLGGD

SEQ ID NO: 271 - protein, 1540 aa, Artificial Sequence
  Description of artificial sequence: 109 Cas9 TadAins 768 polypeptide sequence
MDKKYSIGLAIGTNSVGWAVITDEYKVPSKKFKVLGNTDRHSIKKNLIGALLFDSGETAEATRLKRTARRRYTRRKNRICYLQEIFSNEMAKVDDSFFHRLEESFLVEEDKKHERHPIFGNIVDEVAYHEKYPTIYHLRKKLVDSTDKADLRLIYLALAHMIKFRGHFLIEGDLNPDNSDVDKLFIQLVQTYNQLFEENPINASGVDAKAILSARLSKSRRLENLIAQLPGEKKNGLFGNLIALSLGLTPNFKSNFDLAEDAKLQLSKDTYDDDLDNLLAQIGDQYADLFLAAKNLSDAILLSDILRVNTEITKAPLSASMIKRYDEHHQDLTLLKALVRQQLPEKYKEIFFDQSKNGYAGYIDGGASQEEFYKFIKPILEKMDGTEELLVKLNREDLLRKQRTFDNGSIPHQIHLGELHAILRRQEDFYPFLKDNREKIEKILTFRIPYYVGPLARGNSRFAWMTRKSEETITPWNFEEVVDKGASAQSFIERMTNFDKNLPNEKVLPKHSLLYEYFTVYNELTKVKYVTEGMRKPAFLSGEQKKAIVDLLFKTNRKVTVKQLKEDYFKKIECFDSVEISGVEDRFNASLGTYHDLLKIIKDKDFLDNEENEDILEDIVLTLTLFEDREMIEERLKTYAHLFDDKVMKQLKRRRYTGWGRLSRKLINGIRDKQSGKTILDFLKSDGFANRNFMQLIHDDSLTFKEDIQKAQVSGQGDSLHEHIANLAGSPAIKKGILQTVKVVDELVKVMGRHKPENIVIEMARENQGSSGSETPGTSESATPESSGSEVEFSHEYWMRHALTLAKRARDEREVPVGAVLVLNNRVIGEGWNRAIGLHDPTAHAEIMALRQGGLVMQNYRLIDATLYVTFEPCVMCAGAMIHSRIGRVVFGVRNAKTGAAGSLMDVLHYPGMNHRVEITEGILADECAALLCYFFRMPRTTQKGQKNSRERMKRIEEGIKELGSQILKEHPVENTQLQNEKLYLYYLQNGRDMYVDQELDINRLSDYDVDHIVPQSFLKDDSIDNKVLTRSDKNRGKSDNVPSEEVVKKMKNYWRQLLNAKLITQRKFDNLTKAERGGLSELDKAGFIKRQLVETRQITKHVAQILDSRMNTKYDENDKLIREVKVITLKSKLVSDFRKDFQFYKVREINNYHHAHDAYLNAVVGTALIKKYPKLESEFVYGDYKVYDVRKMIAKSEQEIGKATAKYFFYSNIMNFFKTEITLANGEIRKRPLIETNGETGEIVWDKGRDFATVRKVLSMPQVNIVKKTEVQTGGFSKESILPKRNSDKLIARKKDWDPKKYGGFDSPTVAYSVLVVAKVEKGKSKKLKSVKELLGITIMERSSFEKNPIDFLEAKGYKEVKKDLIIKLPKYSLFELENGRKRMLASAGELQKGNELALPSKYVNFLYLASHYEKLKGSPEDNEQKQLFVEQHKHYLDEIIEQISEFSKRVILADANLDKVLSAYNKHRDKPIREQAENIIHLFTLTNLGAPAAFKYFDTTIDRKRYTSTKEVLDATLIHQSITGLYETRIDLSQLGGD

SEQ ID NO: 272 - protein, 1540 aa, Artificial Sequence
  Description of artificial sequence: 110.1 Cas9 TadAins 1250 polypeptide sequence
MDKKYSIGLAIGTNSVGWAVITDEYKVPSKKFKVLGNTDRHSIKKNLIGALLFDSGETAEATRLKRTARRRYTRRKNRICYLQEIFSNEMAKVDDSFFHRLEESFLVEEDKKHERHPIFGNIVDEVAYHEKYPTIYHLRKKLVDSTDKADLRLIYLALAHMIKFRGHFLIEGDLNPDNSDVDKLFIQLVQTYNQLFEENPINASGVDAKAILSARLSKSRRLENLIAQLPGEKKNGLFGNLIALSLGLTPNFKSNFDLAEDAKLQLSKDTYDDDLDNLLAQIGDQYADLFLAAKNLSDAILLSDILRVNTEITKAPLSASMIKRYDEHHQDLTLLKALVRQQLPEKYKEIFFDQSKNGYAGYIDGGASQEEFYKFIKPILEKMDGTEELLVKLNREDLLRKQRTFDNGSIPHQIHLGELHAILRRQEDFYPFLKDNREKIEKILTFRIPYYVGPLARGNSRFAWMTRKSEETITPWNFEEVVDKGASAQSFIERMTNFDKNLPNEKVLPKHSLLYEYFTVYNELTKVKYVTEGMRKPAFLSGEQKKAIVDLLFKTNRKVTVKQLKEDYFKKIECFDSVEISGVEDRFNASLGTYHDLLKIIKDKDFLDNEENEDILEDIVLTLTLFEDREMIEERLKTYAHLFDDKVMKQLKRRRYTGWGRLSRKLINGIRDKQSGKTILDFLKSDGFANRNFMQLIHDDSLTFKEDIQKAQVSGQGDSLHEHIANLAGSPAIKKGILQTVKVVDELVKVMGRHKPENIVIEMARENQTTQKGQKNSRERMKRIEEGIKELGSQILKEHPVENTQLQNEKLYLYYLQNGRDMYVDQELDINRLSDYDVDHIVPQSFLKDDSIDNKVLTRSDKNRGKSDNVPSEEVVKKMKNYWRQLLNAKLITQRKFDNLTKAERGGLSELDKAGFIKRQLVETRQITKHVAQILDSRMNTKYDENDKLIREVKVITLKSKLVSDFRKDFQFYKVREINNYHHAHDAYLNAVVGTALIKKYPKLESEFVYGDYKVYDVRKMIAKSEQEIGKATAKYFFYSNIMNFFKTEITLANGEIRKRPLIETNGETGEIVWDKGRDFATVRKVLSMPQVNIVKKTEVQTGGFSKESILPKRNSDKLIARKKDWDPKKYGGFDSPTVAYSVLVVAKVEKGKSKKLKSVKELLGITIMERSSFEKNPIDFLEAKGYKEVKKDLIIKLPKYSLFELENGRKRMLASAGELQKGNELALPSKYVNFLYLASHYEKLKGSPGSSGSETPGTSESATPESSGSEVEFSHEYWMRHALTLAKRARDEREVPVGAVLVLNNRVIGEGWNRAIGLHDPTAHAEIMALRQGGLVMQNYRLIDATLYVTFEPCVMCAGAMIHSRIGRVVFGVRNAKTGAAGSLMDVLHYPGMNHRVEITEGILADECAALLCYFFRMPREDNEQKQLFVEQHKHYLDEIIEQISEFSKRVILADANLDKVLSAYNKHRDKPIREQAENIIHLFTLTNLGAPAAFKYFDTTIDRKRYTSTKEVLDATLIHQSITGLYETRIDLSQLGGD

SEQ ID NO: 273 - protein, 1543 aa, Artificial Sequence
  Description of artificial sequence: 110.2 Cas9 TadAins 1250 polypeptide sequence
MDKKYSIGLAIGTNSVGWAVITDEYKVPSKKFKVLGNTDRHSIKKNLIGALLFDSGETAEATRLKRTARRRYTRRKNRICYLQEIFSNEMAKVDDSFFHRLEESFLVEEDKKHERHPIFGNIVDEVAYHEKYPTIYHLRKKLVDSTDKADLRLIYLALAHMIKFRGHFLIEGDLNPDNSDVDKLFIQLVQTYNQLFEENPINASGVDAKAILSARLSKSRRLENLIAQLPGEKKNGLFGNLIALSLGLTPNFKSNFDLAEDAKLQLSKDTYDDDLDNLLAQIGDQYADLFLAAKNLSDAILLSDILRVNTEITKAPLSASMIKRYDEHHQDLTLLKALVRQQLPEKYKEIFFDQSKNGYAGYIDGGASQEEFYKFIKPILEKMDGTEELLVKLNREDLLRKQRTFDNGSIPHQIHLGELHAILRRQEDFYPFLKDNREKIEKILTFRIPYYVGPLARGNSRFAWMTRKSEETITPWNFEEVVDKGASAQSFIERMTNFDKNLPNEKVLPKHSLLYEYFTVYNELTKVKYVTEGMRKPAFLSGEQKKAIVDLLFKTNRKVTVKQLKEDYFKKIECFDSVEISGVEDRFNASLGTYHDLLKIIKDKDFLDNEENEDILEDIVLTLTLFEDREMIEERLKTYAHLFDDKVMKQLKRRRYTGWGRLSRKLINGIRDKQSGKTILDFLKSDGFANRNFMQLIHDDSLTFKEDIQKAQVSGQGDSLHEHIANLAGSPAIKKGILQTVKVVDELVKVMGRHKPENIVIEMARENQTTQKGQKNSRERMKRIEEGIKELGSQILKEHPVENTQLQNEKLYLYYLQNGRDMYVDQELDINRLSDYDVDHIVPQSFLKDDSIDNKVLTRSDKNRGKSDNVPSEEVVKKMKNYWRQLLNAKLITQRKFDNLTKAERGGLSELDKAGFIKRQLVETRQITKHVAQILDSRMNTKYDENDKLIREVKVITLKSKLVSDFRKDFQFYKVREINNYHHAHDAYLNAVVGTALIKKYPKLESEFVYGDYKVYDVRKMIAKSEQEIGKATAKYFFYSNIMNFFKTEITLANGEIRKRPLIETNGETGEIVWDKGRDFATVRKVLSMPQVNIVKKTEVQTGGFSKESILPKRNSDKLIARKKDWDPKKYGGFDSPTVAYSVLVVAKVEKGKSKKLKSVKELLGITIMERSSFEKNPIDFLEAKGYKEVKKDLIIKLPKYSLFELENGRKRMLASAGELQKGNELALPSKYVNFLYLASHYEKLKGSPGSSGSSGSETPGTSESATPESSGSEVEFSHEYWMRHALTLAKRARDEREVPVGAVLVLNNRVIGEGWNRAIGLHDPTAHAEIMALRQGGLVMQNYRLIDATLYVTFEPCVMCAGAMIHSRIGRVVFGVRNAKTGAAGSLMDVLHYPGMNHRVEITEGILADECAALLCYFFRMPREDNEQKQLFVEQHKHYLDEIIEQISEFSKRVILADANLDKVLSAYNKHRDKPIREQAENIIHLFTLTNLGAPAAFKYFDTTIDRKRYTSTKEVLDATLIHQSITGLYETRIDLSQLGGD

SEQ ID NO: 274 - protein, 1546 aa, Artificial Sequence
  Description of artificial sequence: 110.3 Cas9 TadAins 1250 polypeptide sequence
MDKKYSIGLAIGTNSVGWAVITDEYKVPSKKFKVLGNTDRHSIKKNLIGALLFDSGETAEATRLKRTARRRYTRRKNRICYLQEIFSNEMAKVDDSFFHRLEESFLVEEDKKHERHPIFGNIVDEVAYHEKYPTIYHLRKKLVDSTDKADLRLIYLALAHMIKFRGHFLIEGDLNPDNSDVDKLFIQLVQTYNQLFEENPINASGVDAKAILSARLSKSRRLENLIAQLPGEKKNGLFGNLIALSLGLTPNFKSNFDLAEDAKLQLSKDTYDDDLDNLLAQIGDQYADLFLAAKNLSDAILLSDILRVNTEITKAPLSASMIKRYDEHHQDLTLLKALVRQQLPEKYKEIFFDQSKNGYAGYIDGGASQEEFYKFIKPILEKMDGTEELLVKLNREDLLRKQRTFDNGSIPHQIHLGELHAILRRQEDFYPFLKDNREKIEKILTFRIPYYVGPLARGNSRFAWMTRKSEETITPWNFEEVVDKGASAQSFIERMTNFDKNLPNEKVLPKHSLLYEYFTVYNELTKVKYVTEGMRKPAFLSGEQKKAIVDLLFKTNRKVTVKQLKEDYFKKIECFDSVEISGVEDRFNASLGTYHDLLKIIKDKDFLDNEENEDILEDIVLTLTLFEDREMIEERLKTYAHLFDDKVMKQLKRRRYTGWGRLSRKLINGIRDKQSGKTILDFLKSDGFANRNFMQLIHDDSLTFKEDIQKAQVSGQGDSLHEHIANLAGSPAIKKGILQTVKVVDELVKVMGRHKPENIVIEMARENQTTQKGQKNSRERMKRIEEGIKELGSQILKEHPVENTQLQNEKLYLYYLQNGRDMYVDQELDINRLSDYDVDHIVPQSFLKDDSIDNKVLTRSDKNRGKSDNVPSEEVVKKMKNYWRQLLNAKLITQRKFDNLTKAERGGLSELDKAGFIKRQLVETRQITKHVAQILDSRMNTKYDENDKLIREVKVITLKSKLVSDFRKDFQFYKVREINNYHHAHDAYLNAVVGTALIKKYPKLESEFVYGDYKVYDVRKMIAKSEQEIGKATAKYFFYSNIMNFFKTEITLANGEIRKRPLIETNGETGEIVWDKGRDFATVRKVLSMPQVNIVKKTEVQTGGFSKESILPKRNSDKLIARKKDWDPKKYGGFDSPTVAYSVLVVAKVEKGKSKKLKSVKELLGITIMERSSFEKNPIDFLEAKGYKEVKKDLIIKLPKYSLFELENGRKRMLASAGELQKGNELALPSKYVNFLYLASHYEKLKGSPGSSGSSGSETPGTSESATPESGSSSGSEVEFSHEYWMRHALTLAKRARDEREVPVGAVLVLNNRVIGEGWNRAIGLHDPTAHAEIMALRQGGLVMQNYRLIDATLYVTFEPCVMCAGAMIHSRIGRVVFGVRNAKTGAAGSLMDVLHYPGMNHRVEITEGILADECAALLCYFFRMPREDNEQKQLFVEQHKHYLDEIIEQISEFSKRVILADANLDKVLSAYNKHRDKPIREQAENIIHLFTLTNLGAPAAFKYFDTTIDRKRYTSTKEVLDATLIHQSITGLYETRIDLSQLGGD

SEQ ID NO: 275 - protein, 1546 aa, Artificial Sequence
  Description of artificial sequence: 110.4 Cas9 TadAins 1250 polypeptide sequence
MDKKYSIGLAIGTNSVGWAVITDEYKVPSKKFKVLGNTDRHSIKKNLIGALLFDSGETAEATRLKRTARRRYTRRKNRICYLQEIFSNEMAKVDDSFFHRLEESFLVEEDKKHERHPIFGNIVDEVAYHEKYPTIYHLRKKLVDSTDKADLRLIYLALAHMIKFRGHFLIEGDLNPDNSDVDKLFIQLVQTYNQLFEENPINASGVDAKAILSARLSKSRRLENLIAQLPGEKKNGLFGNLIALSLGLTPNFKSNFDLAEDAKLQLSKDTYDDDLDNLLAQIGDQYADLFLAAKNLSDAILLSDILRVNTEITKAPLSASMIKRYDEHHQDLTLLKALVRQQLPEKYKEIFFDQSKNGYAGYIDGGASQEEFYKFIKPILEKMDGTEELLVKLNREDLLRKQRTFDNGSIPHQIHLGELHAILRRQEDFYPFLKDNREKIEKILTFRIPYYVGPLARGNSRFAWMTRKSEETITPWNFEEVVDKGASAQSFIERMTNFDKNLPNEKVLPKHSLLYEYFTVYNELTKVKYVTEGMRKPAFLSGEQKKAIVDLLFKTNRKVTVKQLKEDYFKKIECFDSVEISGVEDRFNASLGTYHDLLKIIKDKDFLDNEENEDILEDIVLTLTLFEDREMIEERLKTYAHLFDDKVMKQLKRRRYTGWGRLSRKLINGIRDKQSGKTILDFLKSDGFANRNFMQLIHDDSLTFKEDIQKAQVSGQGDSLHEHIANLAGSPAIKKGILQTVKVVDELVKVMGRHKPENIVIEMARENQTTQKGQKNSRERMKRIEEGIKELGSQILKEHPVENTQLQNEKLYLYYLQNGRDMYVDQELDINRLSDYDVDHIVPQSFLKDDSIDNKVLTRSDKNRGKSDNVPSEEVVKKMKNYWRQLLNAKLITQRKFDNLTKAERGGLSELDKAGFIKRQLVETRQITKHVAQILDSRMNTKYDENDKLIREVKVITLKSKLVSDFRKDFQFYKVREINNYHHAHDAYLNAVVGTALIKKYPKLESEFVYGDYKVYDVRKMIAKSEQEIGKATAKYFFYSNIMNFFKTEITLANGEIRKRPLIETNGETGEIVWDKGRDFATVRKVLSMPQVNIVKKTEVQTGGFSKESILPKRNSDKLIARKKDWDPKKYGGFDSPTVAYSVLVVAKVEKGKSKKLKSVKELLGITIMERSSFEKNPIDFLEAKGYKEVKKDLIIKLPKYSLFELENGRKRMLASAGELQKGNELALPSKYVNFLYLASHYEKLKGSPGSSGSSGSETPGTSESATPESGSSSGSEVEFSHEYWMRHALTLAKRARDEREVPVGAVLVLNNRVIGEGWNRAIGLHDPTAHAEIMALRQGGLVMQNYRLIDATLYVTFEPCVMCAGAMIHSRIGRVVFGVRNAKTGAAGSLMDVLHYPGMNHRVEITEGILADECAALLCYFFRMRREDNEQKQLFVEQHKHYLDEIIEQISEFSKRVILADANLDKVLSAYNKHRDKPIREQAENIIHLFTLTNLGAPAAFKYFDTTIDRKRYTSTKEVLDATLIHQSITGLYETRIDLSQLGGD

SEQ ID NO: 276 - protein, 1546 aa, Artificial Sequence
  Description of artificial sequence: 110.5 Cas9 TadAins 1249 polypeptide sequence
MDKKYSIGLAIGTNSVGWAVITDEYKVPSKKFKVLGNTDRHSIKKNLIGALLFDSGETAEATRLKRTARRRYTRRKNRICYLQEIFSNEMAKVDDSFFHRLEESFLVEEDKKHERHPIFGNIVDEVAYHEKYPTIYHLRKKLVDSTDKADLRLIYLALAHMIKFRGHFLIEGDLNPDNSDVDKLFIQLVQTYNQLFEENPINASGVDAKAILSARLSKSRRLENLIAQLPGEKKNGLFGNLIALSLGLTPNFKSNFDLAEDAKLQLSKDTYDDDLDNLLAQIGDQYADLFLAAKNLSDAILLSDILRVNTEITKAPLSASMIKRYDEHHQDLTLLKALVRQQLPEKYKEIFFDQSKNGYAGYIDGGASQEEFYKFIKPILEKMDGTEELLVKLNREDLLRKQRTFDNGSIPHQIHLGELHAILRRQEDFYPFLKDNREKIEKILTFRIPYYVGPLARGNSRFAWMTRKSEETITPWNFEEVVDKGASAQSFIERMTNFDKNLPNEKVLPKHSLLYEYFTVYNELTKVKYVTEGMRKPAFLSGEQKKAIVDLLFKTNRKVTVKQLKEDYFKKIECFDSVEISGVEDRFNASLGTYHDLLKIIKDKDFLDNEENEDILEDIVLTLTLFEDREMIEERLKTYAHLFDDKVMKQLKRRRYTGWGRLSRKLINGIRDKQSGKTILDFLKSDGFANRNFMQLIHDDSLTFKEDIQKAQVSGQGDSLHEHIANLAGSPAIKKGILQTVKVVDELVKVMGRHKPENIVIEMARENQTTQKGQKNSRERMKRIEEGIKELGSQILKEHPVENTQLQNEKLYLYYLQNGRDMYVDQELDINRLSDYDVDHIVPQSFLKDDSIDNKVLTRSDKNRGKSDNVPSEEVVKKMKNYWRQLLNAKLITQRKFDNLTKAERGGLSELDKAGFIKRQLVETRQITKHVAQILDSRMNTKYDENDKLIREVKVITLKSKLVSDFRKDFQFYKVREINNYHHAHDAYLNAVVGTALIKKYPKLESEFVYGDYKVYDVRKMIAKSEQEIGKATAKYFFYSNIMNFFKTEITLANGEIRKRPLIETNGETGEIVWDKGRDFATVRKVLSMPQVNIVKKTEVQTGGFSKESILPKRNSDKLIARKKDWDPKKYGGFDSPTVAYSVLVVAKVEKGKSKKLKSVKELLGITIMERSSFEKNPIDFLEAKGYKEVKKDLIIKLPKYSLFELENGRKRMLASAGELQKGNELALPSKYVNFLYLASHYEKLKGSGSSGSSGSETPGTSESATPESGSSSGSEVEFSHEYWMRHALTLAKRARDEREVPVGAVLVLNNRVIGEGWNRAIGLHDPTAHAEIMALRQGGLVMQNYRLIDATLYVTFEPCVMCAGAMIHSRIGRVVFGVRNAKTGAAGSLMDVLHYPGMNHRVEITEGILADECAALLCYFFRMRRPEDNEQKQLFVEQHKHYLDEIIEQISEFSKRVILADANLDKVLSAYNKHRDKPIREQAENIIHLFTLTNLGAPAAFKYFDTTIDRKRYTSTKEVLDATLIHQSITGLYETRIDLSQLGGD

SEQ ID NO: 277 - protein, 1551 aa, Artificial Sequence
  Description of artificial sequence: 110.5 Cas9 TadAins delta 59-66 1250 polypeptide sequence
MDKKYSIGLAIGTNSVGWAVITDEYKVPSKKFKVLGNTDRHSIKKNLIGALLFDSGETAEATRLKRTARRRYTRRKNRICYLQEIFSNEMAKVDDSFFHRLEESFLVEEDKKHERHPIFGNIVDEVAYHEKYPTIYHLRKKLVDSTDKADLRLIYLALAHMIKFRGHFLIEGDLNPDNSDVDKLFIQLVQTYNQLFEENPINASGVDAKAILSARLSKSRRLENLIAQLPGEKKNGLFGNLIALSLGLTPNFKSNFDLAEDAKLQLSKDTYDDDLDNLLAQIGDQYADLFLAAKNLSDAILLSDILRVNTEITKAPLSASMIKRYDEHHQDLTLLKALVRQQLPEKYKEIFFDQSKNGYAGYIDGGASQEEFYKFIKPILEKMDGTEELLVKLNREDLLRKQRTFDNGSIPHQIHLGELHAILRRQEDFYPFLKDNREKIEKILTFRIPYYVGPLARGNSRFAWMTRKSEETITPWNFEEVVDKGASAQSFIERMTNFDKNLPNEKVLPKHSLLYEYFTVYNELTKVKYVTEGMRKPAFLSGEQKKAIVDLLFKTNRKVTVKQLKEDYFKKIECFDSVEISGVEDRFNASLGTYHDLLKIIKDKDFLDNEENEDILEDIVLTLTLFEDREMIEERLKTYAHLFDDKVMKQLKRRRYTGWGRLSRKLINGIRDKQSGKTILDFLKSDGFANRNFMQLIHDDSLTFKEDIQKAQVSGQGDSLHEHIANLAGSPAIKKGILQTVKVVDELVKVMGRHKPENIVIEMARENQTTQKGQKNSRERMKRIEEGIKELGSQILKEHPVENTQLQNEKLYLYYLQNGRDMYVDQELDINRLSDYDVDHIVPQSFLKDDSIDNKVLTRSDKNRGKSDNVPSEEVVKKMKNYWRQLLNAKLITQRKFDNLTKAERGGLSELDKAGFIKRQLVETRQITKHVAQILDSRMNTKYDENDKLIREVKVITLKSKLVSDFRKDFQFYKVREINNYHHAHDAYLNAVVGTALIKKYPKLESEFVYGDYKVYDVRKMIAKSEQEIGKATAKYFFYSNIMNFFKTEITLANGEIRKRPLIETNGETGEIVWDKGRDFATVRKVLSMPQVNIVKKTEVQTGGFSKESILPKRNSDKLIARKKDWDPKKYGGFDSPTVAYSVLVVAKVEKGKSKKLKSVKELLGITIMERSSFEKNPIDFLEAKGYKEVKKDLIIKLPKYSLFELENGRKRMLASAGELQKGNELALPSKYVNFLYLASHYEKLKGSPGSSGSSGSETPGTSESATPESGSSGSEVEFSHEYWMRHALTLAKRARDEREVPVGAVLVLNNRVIGEGWNRAHAEIMALRQGGLVMQNYRLIDATLYVTFEPCVMCAGAMIHSRIGRVVFGVRNAKTGAAGSLMDVLHYPGMNHRVEITEGILADECAALLCYFFRMPRQVFNAQKKAQSSTDEDNEQKQLFVEQHKHYLDEIIEQISEFSKRVILADANLDKVLSAYNKHRDKPIREQAENIIHLFTLTNLGAPAAFKYFDTTIDRKRYTSTKEVLDATLIHQSITGLYETRIDLSQLGGD

SEQ ID NO: 278 - protein, 1546 aa, Artificial Sequence
  Description of artificial sequence: 110.6 Cas9 TadAins 1251 polypeptide sequence
MDKKYSIGLAIGTNSVGWAVITDEYKVPSKKFKVLGNTDRHSIKKNLIGALLFDSGETAEATRLKRTARRRYTRRKNRICYLQEIFSNEMAKVDDSFFHRLEESFLVEEDKKHERHPIFGNIVDEVAYHEKYPTIYHLRKKLVDSTDKADLRLIYLALAHMIKFRGHFLIEGDLNPDNSDVDKLFIQLVQTYNQLFEENPINASGVDAKAILSARLSKSRRLENLIAQLPGEKKNGLFGNLIALSLGLTPNFKSNFDLAEDAKLQLSKDTYDDDLDNLLAQIGDQYADLFLAAKNLSDAILLSDILRVNTEITKAPLSASMIKRYDEHHQDLTLLKALVRQQLPEKYKEIFFDQSKNGYAGYIDGGASQEEFYKFIKPILEKMDGTEELLVKLNREDLLRKQRTFDNGSIPHQIHLGELHAILRRQEDFYPFLKDNREKIEKILTFRIPYYVGPLARGNSRFAWMTRKSEETITPWNFEEVVDKGASAQSFIERMTNFDKNLPNEKVLPKHSLLYEYFTVYNELTKVKYVTEGMRKPAFLSGEQKKAIVDLLFKTNRKVTVKQLKEDYFKKIECFDSVEISGVEDRFNASLGTYHDLLKIIKDKDFLDNEENEDILEDIVLTLTLFEDREMIEERLKTYAHLFDDKVMKQLKRRRYTGWGRLSRKLINGIRDKQSGKTILDFLKSDGFANRNFMQLIHDDSLTFKEDIQKAQVSGQGDSLHEHIANLAGSPAIKKGILQTVKVVDELVKVMGRHKPENIVIEMARENQTTQKGQKNSRERMKRIEEGIKELGSQILKEHPVENTQLQNEKLYLYYLQNGRDMYVDQELDINRLSDYDVDHIVPQSFLKDDSIDNKVLTRSDKNRGKSDNVPSEEVVKKMKNYWRQLLNAKLITQRKFDNLTKAERGGLSELDKAGFIKRQLVETRQITKHVAQILDSRMNTKYDENDKLIREVKVITLKSKLVSDFRKDFQFYKVREINNYHHAHDAYLNAVVGTALIKKYPKLESEFVYGDYKVYDVRKMIAKSEQEIGKATAKYFFYSNIMNFFKTEITLANGEIRKRPLIETNGETGEIVWDKGRDFATVRKVLSMPQVNIVKKTEVQTGGFSKESILPKRNSDKLIARKKDWDPKKYGGFDSPTVAYSVLVVAKVEKGKSKKLKSVKELLGITIMERSSFEKNPIDFLEAKGYKEVKKDLIIKLPKYSLFELENGRKRMLASAGELQKGNELALPSKYVNFLYLASHYEKLKGSPEGSSGSSGSETPGTSESATPESGSSSGSEVEFSHEYWMRHALTLAKRARDEREVPVGAVLVLNNRVIGEGWNRAIGLHDPTAHAEIMALRQGGLVMQNYRLIDATLYVTFEPCVMCAGAMIHSRIGRVVFGVRNAKTGAAGSLMDVLHYPGMNHRVEITEGILADECAALLCYFFRMRRDNEQKQLFVEQHKHYLDEIIEQISEFSKRVILADANLDKVLSAYNKHRDKPIREQAENIIHLFTLTNLGAPAAFKYFDTTIDRKRYTSTKEVLDATLIHQSITGLYETRIDLSQLGGD

SEQ ID NO: 279 - protein, 1546 aa, Artificial Sequence
  Description of artificial sequence: 110.7 Cas9 TadAins 1252 polypeptide sequence
MDKKYSIGLAIGTNSVGWAVITDEYKVPSKKFKVLGNTDRHSIKKNLIGALLFDSGETAEATRLKRTARRRYTRRKNRICYLQEIFSNEMAKVDDSFFHRLEESFLVEEDKKHERHPIFGNIVDEVAYHEKYPTIYHLRKKLVDSTDKADLRLIYLALAHMIKFRGHFLIEGDLNPDNSDVDKLFIQLVQTYNQLFEENPINASGVDAKAILSARLSKSRRLENLIAQLPGEKKNGLFGNLIALSLGLTPNFKSNFDLAEDAKLQLSKDTYDDDLDNLLAQIGDQYADLFLAAKNLSDAILLSDILRVNTEITKAPLSASMIKRYDEHHQDLTLLKALVRQQLPEKYKEIFFDQSKNGYAGYIDGGASQEEFYKFIKPILEKMDGTEELLVKLNREDLLRKQRTFDNGSIPHQIHLGELHAILRRQEDFYPFLKDNREKIEKILTFRIPYYVGPLARGNSRFAWMTRKSEETITPWNFEEVVDKGASAQSFIERMTNFDKNLPNEKVLPKHSLLYEYFTVYNELTKVKYVTEGMRKPAFLSGEQKKAIVDLLFKTNRKVTVKQLKEDYFKKIECFDSVEISGVEDRFNASLGTYHDLLKIIKDKDFLDNEENEDILEDIVLTLTLFEDREMIEERLKTYAHLFDDKVMKQLKRRRYTGWGRLSRKLINGIRDKQSGKTILDFLKSDGFANRNFMQLIHDDSLTFKEDIQKAQVSGQGDSLHEHIANLAGSPAIKKGILQTVKVVDELVKVMGRHKPENIVIEMARENQTTQKGQKNSRERMKRIEEGIKELGSQILKEHPVENTQLQNEKLYLYYLQNGRDMYVDQELDINRLSDYDVDHIVPQSFLKDDSIDNKVLTRSDKNRGKSDNVPSEEVVKKMKNYWRQLLNAKLITQRKFDNLTKAERGGLSELDKAGFIKRQLVETRQITKHVAQILDSRMNTKYDENDKLIREVKVITLKSKLVSDFRKDFQFYKVREINNYHHAHDAYLNAVVGTALIKKYPKLESEFVYGDYKVYDVRKMIAKSEQEIGKATAKYFFYSNIMNFFKTEITLANGEIRKRPLIETNGETGEIVWDKGRDFATVRKVLSMPQVNIVKKTEVQTGGFSKESILPKRNSDKLIARKKDWDPKKYGGFDSPTVAYSVLVVAKVEKGKSKKLKSVKELLGITIMERSSFEKNPIDFLEAKGYKEVKKDLIIKLPKYSLFELENGRKRMLASAGELQKGNELALPSKYVNFLYLASHYEKLKGSPEDGSSGSSGSETPGTSESATPESGSSSGSEVEFSHEYWMRHALTLAKRARDEREVPVGAVLVLNNRVIGEGWNRAIGLHDPTAHAEIMALRQGGLVMQNYRLIDATLYVTFEPCVMCAGAMIHSRIGRVVFGVRNAKTGAAGSLMDVLHYPGMNHRVEITEGILADECAALLCYFFRMRRNEQKQLFVEQHKHYLDEIIEQISEFSKRVILADANLDKVLSAYNKHRDKPIREQAENIIHLFTLTNLGAPAAFKYFDTTIDRKRYTSTKEVLDATLIHQSITGLYETRIDLSQLGGD

SEQ ID NO: 280 - protein, 1533 aa, Artificial Sequence
  Description of artificial sequence: 110.8 Cas9 TadAins delta 59-66 C-truncate 1250 polypeptide sequence
MDKKYSIGLAIGTNSVGWAVITDEYKVPSKKFKVLGNTDRHSIKKNLIGALLFDSGETAEATRLKRTARRRYTRRKNRICYLQEIFSNEMAKVDDSFFHRLEESFLVEEDKKHERHPIFGNIVDEVAYHEKYPTIYHLRKKLVDSTDKADLRLIYLALAHMIKFRGHFLIEGDLNPDNSDVDKLFIQLVQTYNQLFEENPINASGVDAKAILSARLSKSRRLENLIAQLPGEKKNGLFGNLIALSLGLTPNFKSNFDLAEDAKLQLSKDTYDDDLDNLLAQIGDQYADLFLAAKNLSDAILLSDILRVNTEITKAPLSASMIKRYDEHHQDLTLLKALVRQQLPEKYKEIFFDQSKNGYAGYIDGGASQEEFYKFIKPILEKMDGTEELLVKLNREDLLRKQRTFDNGSIPHQIHLGELHAILRRQEDFYPFLKDNREKIEKILTFRIPYYVGPLARGNSRFAWMTRKSEETITPWNFEEVVDKGASAQSFIERMTNFDKNLPNEKVLPKHSLLYEYFTVYNELTKVKYVTEGMRKPAFLSGEQKKAIVDLLFKTNRKVTVKQLKEDYFKKIECFDSVEISGVEDRFNASLGTYHDLLKIIKDKDFLDNEENEDILEDIVLTLTLFEDREMIEERLKTYAHLFDDKVMKQLKRRRYTGWGRLSRKLINGIRDKQSGKTILDFLKSDGFANRNFMQLIHDDSLTFKEDIQKAQVSGQGDSLHEHIANLAGSPAIKKGILQTVKVVDELVKVMGRHKPENIVIEMARENQTTQKGQKNSRERMKRIEEGIKELGSQILKEHPVENTQLQNEKLYLYYLQNGRDMYVDQELDINRLSDYDVDHIVPQSFLKDDSIDNKVLTRSDKNRGKSDNVPSEEVVKKMKNYWRQLLNAKLITQRKFDNLTKAERGGLSELDKAGFIKRQLVETRQITKHVAQILDSRMNTKYDENDKLIREVKVITLKSKLVSDFRKDFQFYKVREINNYHHAHDAYLNAVVGTALIKKYPKLESEFVYGDYKVYDVRKMIAKSEQEIGKATAKYFFYSNIMNFFKTEITLANGEIRKRPLIETNGETGEIVWDKGRDFATVRKVLSMPQVNIVKKTEVQTGGFSKESILPKRNSDKLIARKKDWDPKKYGGFDSPTVAYSVLVVAKVEKGKSKKLKSVKELLGITIMERSSFEKNPIDFLEAKGYKEVKKDLIIKLPKYSLFELENGRKRMLASAGELQKGNELALPSKYVNFLYLASHYEKLKGSPGSSGSETPGTSESATPESSGSEVEFSHEYWMRHALTLAKRARDEREVPVGAVLVLNNRVIGEGWNRAHAEIMALRQGGLVMQNYRLIDATLYVTFEPCVMCAGAMIHSRIGRVVFGVRNAKTGAAGSLMDVLHYPGMNHRVEITEGILADECAALLCYFFRMPRQEDNEQKQLFVEQHKHYLDEIIEQISEFSKRVILADANLDKVLSAYNKHRDKPIREQAENIIHLFTLTNLGAPAAFKYFDTTIDRKRYTSTKEVLDATLIHQSITGLYETRIDLSQLGGD

SEQ ID NO: 281 - protein, 1549 aa, Artificial Sequence
  Description of artificial sequence: 111.1 Cas9 TadAins 997 polypeptide sequence
MDKKYSIGLAIGTNSVGWAVITDEYKVPSKKFKVLGNTDRHSIKKNLIGALLFDSGETAEATRLKRTARRRYTRRKNRICYLQEIFSNEMAKVDDSFFHRLEESFLVEEDKKHERHPIFGNIVDEVAYHEKYPTIYHLRKKLVDSTDKADLRLIYLALAHMIKFRGHFLIEGDLNPDNSDVDKLFIQLVQTYNQLFEENPINASGVDAKAILSARLSKSRRLENLIAQLPGEKKNGLFGNLIALSLGLTPNFKSNFDLAEDAKLQLSKDTYDDDLDNLLAQIGDQYADLFLAAKNLSDAILLSDILRVNTEITKAPLSASMIKRYDEHHQDLTLLKALVRQQLPEKYKEIFFDQSKNGYAGYIDGGASQEEFYKFIKPILEKMDGTEELLVKLNREDLLRKQRTFDNGSIPHQIHLGELHAILRRQEDFYPFLKDNREKIEKILTFRIPYYVGPLARGNSRFAWMTRKSEETITPWNFEEVVDKGASAQSFIERMTNFDKNLPNEKVLPKHSLLYEYFTVYNELTKVKYVTEGMRKPAFLSGEQKKAIVDLLFKTNRKVTVKQLKEDYFKKIECFDSVEISGVEDRFNASLGTYHDLLKIIKDKDFLDNEENEDILEDIVLTLTLFEDREMIEERLKTYAHLFDDKVMKQLKRRRYTGWGRLSRKLINGIRDKQSGKTILDFLKSDGFANRNFMQLIHDDSLTFKEDIQKAQVSGQGDSLHEHIANLAGSPAIKKGILQTVKVVDELVKVMGRHKPENIVIEMARENQTTQKGQKNSRERMKRIEEGIKELGSQILKEHPVENTQLQNEKLYLYYLQNGRDMYVDQELDINRLSDYDVDHIVPQSFLKDDSIDNKVLTRSDKNRGKSDNVPSEEVVKKMKNYWRQLLNAKLITQRKFDNLTKAERGGLSELDKAGFIKRQLVETRQITKHVAQILDSRMNTKYDENDKLIREVKVITLKSKLVSDFRKDFQFYKVREINNYHHAHDAYLNAVVGTALSHEYWMRHALTLAKRARDEREVPVGAVLVLNNRVIGEGWNRAIGLHDPTAHAEIMALRQGGLVMQNYRLIDATLYVTFEPCVMCAGAMIHSRIGRVVFGVRNAKTGAAGSLMDVLHYPGMNHRVEITEGILADECAALLCYFFRMPRQVFNAQKKAQSSTDGSSGSETPGTSESATPESSGIKKYPKLESEFVYGDYKVYDVRKMIAKSEQEIGKATAKYFFYSNIMNFFKTEITLANGEIRKRPLIETNGETGEIVWDKGRDFATVRKVLSMPQVNIVKKTEVQTGGFSKESILPKRNSDKLIARKKDWDPKKYGGFDSPTVAYSVLVVAKVEKGKSKKLKSVKELLGITIMERSSFEKNPIDFLEAKGYKEVKKDLIIKLPKYSLFELENGRKRMLASAGELQKGNELALPSKYVNFLYLASHYEKLKGSPEDNEQKQLFVEQHKHYLDEIIEQISEFSKRVILADANLDKVLSAYNKHRDKPIREQAENIIHLFTLTNLGAPAAFKYFDTTIDRKRYTSTKEVLDATLIHQSITGLYETRIDLSQLGGD

SEQ ID NO: 282 - protein, 1555 aa, Artificial Sequence
  Description of artificial sequence: 111.2 Cas9 TadAins 997 polypeptide sequence
MDKKYSIGLAIGTNSVGWAVITDEYKVPSKKFKVLGNTDRHSIKKNLIGALLFDSGETAEATRLKRTARRRYTRRKNRICYLQEIFSNEMAKVDDSFFHRLEESFLVEEDKKHERHPIFGNIVDEVAYHEKYPTIYHLRKKLVDSTDKADLRLIYLALAHMIKFRGHFLIEGDLNPDNSDVDKLFIQLVQTYNQLFEENPINASGVDAKAILSARLSKSRRLENLIAQLPGEKKNGLFGNLIALSLGLTPNFKSNFDLAEDAKLQLSKDTYDDDLDNLLAQIGDQYADLFLAAKNLSDAILLSDILRVNTEITKAPLSASMIKRYDEHHQDLTLLKALVRQQLPEKYKEIFFDQSKNGYAGYIDGGASQEEFYKFIKPILEKMDGTEELLVKLNREDLLRKQRTFDNGSIPHQIHLGELHAILRRQEDFYPFLKDNREKIEKILTFRIPYYVGPLARGNSRFAWMTRKSEETITPWNFEEVVDKGASAQSFIERMTNFDKNLPNEKVLPKHSLLYEYFTVYNELTKVKYVTEGMRKPAFLSGEQKKAIVDLLFKTNRKVTVKQLKEDYFKKIECFDSVEISGVEDRFNASLGTYHDLLKIIKDKDFLDNEENEDILEDIVLTLTLFEDREMIEERLKTYAHLFDDKVMKQLKRRRYTGWGRLSRKLINGIRDKQSGKTILDFLKSDGFANRNFMQLIHDDSLTFKEDIQKAQVSGQGDSLHEHIANLAGSPAIKKGILQTVKVVDELVKVMGRHKPENIVIEMARENQTTQKGQKNSRERMKRIEEGIKELGSQILKEHPVENTQLQNEKLYLYYLQNGRDMYVDQELDINRLSDYDVDHIVPQSFLKDDSIDNKVLTRSDKNRGKSDNVPSEEVVKKMKNYWRQLLNAKLITQRKFDNLTKAERGGLSELDKAGFIKRQLVETRQITKHVAQILDSRMNTKYDENDKLIREVKVITLKSKLVSDFRKDFQFYKVREINNYHHAHDAYLNAVVGTALSHEYWMRHALTLAKRARDEREVPVGAVLVLNNRVIGEGWNRAIGLHDPTAHAEIMALRQGGLVMQNYRLIDATLYVTFEPCVMCAGAMIHSRIGRVVFGVRNAKTGAAGSLMDVLHYPGMNHRVEITEGILADECAALLCYFFRMPRQVFNAQKKAQSSTDGSSGSSGSETPGTSESATPESSGGSSIKKYPKLESEFVYGDYKVYDVRKMIAKSEQEIGKATAKYFFYSNIMNFFKTEITLANGEIRKRPLIETNGETGEIVWDKGRDFATVRKVLSMPQVNIVKKTEVQTGGFSKESILPKRNSDKLIARKKDWDPKKYGGFDSPTVAYSVLVVAKVEKGKSKKLKSVKELLGITIMERSSFEKNPIDFLEAKGYKEVKKDLIIKLPKYSLFELENGRKRMLASAGELQKGNELALPSKYVNFLYLASHYEKLKGSPEDNEQKQLFVEQHKHYLDEIIEQISEFSKRVILADANLDKVLSAYNKHRDKPIREQAENIIHLFTLTNLGAPAAFKYFDTTIDRKRYTSTKEVLDATLIHQSITGLYETRIDLSQLGGD

SEQ ID NO: 283 - protein, 1421 aa, Artificial Sequence
  Description of artificial sequence: 112 delta HNH TadA polypeptide sequence
MDKKYSIGLAIGTNSVGWAVITDEYKVPSKKFKVLGNTDRHSIKKNLIGALLFDSGETAEATRLKRTARRRYTRRKNRICYLQEIFSNEMAKVDDSFFHRLEESFLVEEDKKHERHPIFGNIVDEVAYHEKYPTIYHLRKKLVDSTDKADLRLIYLALAHMIKFRGHFLIEGDLNPDNSDVDKLFIQLVQTYNQLFEENPINASGVDAKAILSARLSKSRRLENLIAQLPGEKKNGLFGNLIALSLGLTPNFKSNFDLAEDAKLQLSKDTYDDDLDNLLAQIGDQYADLFLAAKNLSDAILLSDILRVNTEITKAPLSASMIKRYDEHHQDLTLLKALVRQQLPEKYKEIFFDQSKNGYAGYIDGGASQEEFYKFIKPILEKMDGTEELLVKLNREDLLRKQRTFDNGSIPHQIHLGELHAILRRQEDFYPFLKDNREKIEKILTFRIPYYVGPLARGNSRFAWMTRKSEETITPWNFEEVVDKGASAQSFIERMTNFDKNLPNEKVLPKHSLLYEYFTVYNELTKVKYVTEGMRKPAFLSGEQKKAIVDLLFKTNRKVTVKQLKEDYFKKIECFDSVEISGVEDRFNASLGTYHDLLKIIKDKDFLDNEENEDILEDIVLTLTLFEDREMIEERLKTYAHLFDDKVMKQLKRRRYTGWGRLSRKLINGIRDKQSGKTILDFLKSDGFANRNFMQLIHDDSLTFKEDIQKAQVSGQGDSLHEHIANLAGSPAIKKGILQTVKVVDELVKVMGRHKPENIVIEMARENQTTQKGQKNSRERMKRIEEGIKELGSEVEFSHEYWMRHALTLAKRARDEREVPVGAVLVLNNRVIGEGWNRAIGLHDPTAHAEIMALRQGGLVMQNYRLIDATLYVTFEPCVMCAGAMIHSRIGRVVFGVRNAKTGAAGSLMDVLHYPGMNHRVEITEGILADECAALLCYFFRMPRQVFNAQKKAQSSTDGGLSELDKAGFIKRQLVETRQITKHVAQILDSRMNTKYDENDKLIREVKVITLKSKLVSDFRKDFQFYKVREINNYHHAHDAYLNAVVGTALIKKYPKLESEFVYGDYKVYDVRKMIAKSEQEIGKATAKYFFYSNIMNFFKTEITLANGEIRKRPLIETNGETGEIVWDKGRDFATVRKVLSMPQVNIVKKTEVQTGGFSKESILPKRNSDKLIARKKDWDPKKYGGFDSPTVAYSVLVVAKVEKGKSKKLKSVKELLGITIMERSSFEKNPIDFLEAKGYKEVKKDLIIKLPKYSLFELENGRKRMLASAGELQKGNELALPSKYVNFLYLASHYEKLKGSPEDNEQKQLFVEQHKHYLDEIIEQISEFSKRVILADANLDKVLSAYNKHRDKPIREQAENIIHLFTLTNLGAPAAFKYFDTTIDRKRYTSTKEVLDATLIHQSITGLYETRIDLSQLGGD

SEQ ID NO: 284 - protein, 1552 aa, Artificial Sequence
  Description of artificial sequence: 113 N-term single TadA helix trunc 165-end polypeptide sequence
MSEVEFSHEYWMRHALTLAKRARDEREVPVGAVLVLNNRVIGEGWNRAIGLHDPTAHAEIMALRQGGLVMQNYRLIDATLYVTFEPCVMCAGAMIHSRIGRVVFGVRNAKTGAAGSLMDVLHYPGMNHRVEITEGILADECAALLCYFFRMPRSGGSSGGSSGSETPGTSESATPESSGGSSGGSDKKYSIGLAIGTNSVGWAVITDEYKVPSKKFKVLGNTDRHSIKKNLIGALLFDSGETAEATRLKRTARRRYTRRKNRICYLQEIFSNEMAKVDDSFFHRLEESFLVEEDKKHERHPIFGNIVDEVAYHEKYPTIYHLRKKLVDSTDKADLRLIYLALAHMIKFRGHFLIEGDLNPDNSDVDKLFIQLVQTYNQLFEENPINASGVDAKAILSARLSKSRRLENLIAQLPGEKKNGLFGNLIALSLGLTPNFKSNFDLAEDAKLQLSKDTYDDDLDNLLAQIGDQYADLFLAAKNLSDAILLSDILRVNTEITKAPLSASMIKRYDEHHQDLTLLKALVRQQLPEKYKEIFFDQSKNGYAGYIDGGASQEEFYKFIKPILEKMDGTEELLVKLNREDLLRKQRTFDNGSIPHQIHLGELHAILRRQEDFYPFLKDNREKIEKILTFRIPYYVGPLARGNSRFAWMTRKSEETITPWNFEEVVDKGASAQSFIERMTNFDKNLPNEKVLPKHSLLYEYFTVYNELTKVKYVTEGMRKPAFLSGEQKKAIVDLLFKTNRKVTVKQLKEDYFKKIECFDSVEISGVEDRFNASLGTYHDLLKIIKDKDFLDNEENEDILEDIVLTLTLFEDREMIEERLKTYAHLFDDKVMKQLKRRRYTGWGRLSRKLINGIRDKQSGKTILDFLKSDGFANRNFMQLIHDDSLTFKEDIQKAQVSGQGDSLHEHIANLAGSPAIKKGILQTVKVVDELVKVMGRHKPENIVIEMARENQTTQKGQKNSRERMKRIEEGIKELGSQILKEHPVENTQLQNEKLYLYYLQNGRDMYVDQELDINRLSDYDVDHIVPQSFLKDDSIDNKVLTRSDKNRGKSDNVPSEEVVKKMKNYWRQLLNAKLITQRKFDNLTKAERGGLSELDKAGFIKRQLVETRQITKHVAQILDSRMNTKYDENDKLIREVKVITLKSKLVSDFRKDFQFYKVREINNYHHAHDAYLNAVVGTALIKKYPKLESEFVYGDYKVYDVRKMIAKSEQEIGKATAKYFFYSNIMNFFKTEITLANGEIRKRPLIETNGETGEIVWDKGRDFATVRKVLSMPQVNIVKKTEVQTGGFSKESILPKRNSDKLIARKKDWDPKKYGGFDSPTVAYSVLVVAKVEKGKSKKLKSVKELLGITIMERSSFEKNPIDFLEAKGYKEVKKDLIIKLPKYSLFELENGRKRMLASAGELQKGNELALPSKYVNFLYLASHYEKLKGSPEDNEQKQLFVEQHKHYLDEIIEQISEFSKRVILADANLDKVLSAYNKHRDKPIREQAENIIHLFTLTNLGAPAAFKYFDTTIDRKRYTSTKEVLDATLIHQSITGLYETRIDLSQLGGD

SEQ ID NO: 285 - protein, 1545 aa, Artificial Sequence
  Description of artificial sequence: 114 N-term single TadA helix trunc 165-end delta 59-65 polypeptide sequence
MSEVEFSHEYWMRHALTLAKRARDEREVPVGAVLVLNNRVIGEGWNRTAHAEIMALRQGGLVMQNYRLIDATLYVTFEPCVMCAGAMIHSRIGRVVFGVRNAKTGAAGSLMDVLHYPGMNHRVEITEGILADECAALLCYFFRMPRSGGSSGGSSGSETPGTSESATPESSGGSSGGSDKKYSIGLAIGTNSVGWAVITDEYKVPSKKFKVLGNTDRHSIKKNLIGALLFDSGETAEATRLKRTARRRYTRRKNRICYLQEIFSNEMAKVDDSFFHRLEESFLVEEDKKHERHPIFGNIVDEVAYHEKYPTIYHLRKKLVDSTDKADLRLIYLALAHMIKFRGHFLIEGDLNPDNSDVDKLFIQLVQTYNQLFEENPINASGVDAKAILSARLSKSRRLENLIAQLPGEKKNGLFGNLIALSLGLTPNFKSNFDLAEDAKLQLSKDTYDDDLDNLLAQIGDQYADLFLAAKNLSDAILLSDILRVNTEITKAPLSASMIKRYDEHHQDLTLLKALVRQQLPEKYKEIFFDQSKNGYAGYIDGGASQEEFYKFIKPILEKMDGTEELLVKLNREDLLRKQRTFDNGSIPHQIHLGELHAILRRQEDFYPFLKDNREKIEKILTFRIPYYVGPLARGNSRFAWMTRKSEETITPWNFEEVVDKGASAQSFIERMTNFDKNLPNEKVLPKHSLLYEYFTVYNELTKVKYVTEGMRKPAFLSGEQKKAIVDLLFKTNRKVTVKQLKEDYFKKIECFDSVEISGVEDRFNASLGTYHDLLKIIKDKDFLDNEENEDILEDIVLTLTLFEDREMIEERLKTYAHLFDDKVMKQLKRRRYTGWGRLSRKLINGIRDKQSGKTILDFLKSDGFANRNFMQLIHDDSLTFKEDIQKAQVSGQGDSLHEHIANLAGSPAIKKGILQTVKVVDELVKVMGRHKPENIVIEMARENQTTQKGQKNSRERMKRIEEGIKELGSQILKEHPVENTQLQNEKLYLYYLQNGRDMYVDQELDINRLSDYDVDHIVPQSFLKDDSIDNKVLTRSDKNRGKSDNVPSEEVVKKMKNYWRQLLNAKLITQRKFDNLTKAERGGLSELDKAGFIKRQLVETRQITKHVAQILDSRMNTKYDENDKLIREVKVITLKSKLVSDFRKDFQFYKVREINNYHHAHDAYLNAVVGTALIKKYPKLESEFVYGDYKVYDVRKMIAKSEQEIGKATAKYFFYSNIMNFFKTEITLANGEIRKRPLIETNGETGEIVWDKGRDFATVRKVLSMPQVNIVKKTEVQTGGFSKESILPKRNSDKLIARKKDWDPKKYGGFDSPTVAYSVLVVAKVEKGKSKKLKSVKELLGITIMERSSFEKNPIDFLEAKGYKEVKKDLIIKLPKYSLFELENGRKRMLASAGELQKGNELALPSKYVNFLYLASHYEKLKGSPEDNEQKQLFVEQHKHYLDEIIEQISEFSKRVILADANLDKVLSAYNKHRDKPIREQAENIIHLFTLTNLGAPAAFKYFDTTIDRKRYTSTKEVLDATLIHQSITGLYETRIDLSQLGGD

SEQ ID NO: 286 - protein, 1541 aa, Artificial Sequence
  Description of artificial sequence: 115.1 Cas9 TadAins1004 polypeptide sequence
MDKKYSIGLAIGTNSVGWAVITDEYKVPSKKFKVLGNTDRHSIKKNLIGALLFDSGETAEATRLKRTARRRYTRRKNRICYLQEIFSNEMAKVDDSFFHRLEESFLVEEDKKHERHPIFGNIVDEVAYHEKYPTIYHLRKKLVDSTDKADLRLIYLALAHMIKFRGHFLIEGDLNPDNSDVDKLFIQLVQTYNQLFEENPINASGVDAKAILSARLSKSRRLENLIAQLPGEKKNGLFGNLIALSLGLTPNFKSNFDLAEDAKLQLSKDTYDDDLDNLLAQIGDQYADLFLAAKNLSDAILLSDILRVNTEITKAPLSASMIKRYDEHHQDLTLLKALVRQQLPEKYKEIFFDQSKNGYAGYIDGGASQEEFYKFIKPILEKMDGTEELLVKLNREDLLRKQRTFDNGSIPHQIHLGELHAILRRQEDFYPFLKDNREKIEKILTFRIPYYVGPLARGNSRFAWMTRKSEETITPWNFEEVVDKGASAQSFIERMTNFDKNLPNEKVLPKHSLLYEYFTVYNELTKVKYVTEGMRKPAFLSGEQKKAIVDLLFKTNRKVTVKQLKEDYFKKIECFDSVEISGVEDRFNASLGTYHDLLKIIKDKDFLDNEENEDILEDIVLTLTLFEDREMIEERLKTYAHLFDDKVMKQLKRRRYTGWGRLSRKLINGIRDKQSGKTILDFLKSDGFANRNFMQLIHDDSLTFKEDIQKAQVSGQGDSLHEHIANLAGSPAIKKGILQTVKVVDELVKVMGRHKPENIVIEMARENQTTQKGQKNSRERMKRIEEGIKELGSQILKEHPVENTQLQNEKLYLYYLQNGRDMYVDQELDINRLSDYDVDHIVPQSFLKDDSIDNKVLTRSDKNRGKSDNVPSEEVVKKMKNYWRQLLNAKLITQRKFDNLTKAERGGLSELDKAGFIKRQLVETRQITKHVAQILDSRMNTKYDENDKLIREVKVITLKSKLVSDFRKDFQFYKVREINNYHHAHDAYLNAVVGTALIKKYPKGSSGSETPGTSESATPESSGSEVEFSHEYWMRHALTLAKRARDEREVPVGAVLVLNNRVIGEGWNRAIGLHDPTAHAEIMALRQGGLVMQNYRLIDATLYVTFEPCVMCAGAMIHSRIGRVVFGVRNAKTGAAGSLMDVLHYPGMNHRVEITEGILADECAALLCYFFRMPRQLESEFVYGDYKVYDVRKMIAKSEQEIGKATAKYFFYSNIMNFFKTEITLANGEIRKRPLIETNGETGEIVWDKGRDFATVRKVLSMPQVNIVKKTEVQTGGFSKESILPKRNSDKLIARKKDWDPKKYGGFDSPTVAYSVLVVAKVEKGKSKKLKSVKELLGITIMERSSFEKNPIDFLEAKGYKEVKKDLIIKLPKYSLFELENGRKRMLASAGELQKGNELALPSKYVNFLYLASHYEKLKGSPEDNEQKQLFVEQHKHYLDEIIEQISEFSKRVILADANLDKVLSAYNKHRDKPIREQAENIIHLFTLTNLGAPAAFKYFDTTIDRKRYTSTKEVLDATLIHQSITGLYETRIDLSQLGGD

SEQ ID NO: 287 - protein, 1541 aa, Artificial Sequence
  Description of artificial sequence: 115.2 Cas9 TadAins1005 polypeptide sequence
MDKKYSIGLAIGTNSVGWAVITDEYKVPSKKFKVLGNTDRHSIKKNLIGALLFDSGETAEATRLKRTARRRYTRRKNRICYLQEIFSNEMAKVDDSFFHRLEESFLVEEDKKHERHPIFGNIVDEVAYHEKYPTIYHLRKKLVDSTDKADLRLIYLALAHMIKFRGHFLIEGDLNPDNSDVDKLFIQLVQTYNQLFEENPINASGVDAKAILSARLSKSRRLENLIAQLPGEKKNGLFGNLIALSLGLTPNFKSNFDLAEDAKLQLSKDTYDDDLDNLLAQIGDQYADLFLAAKNLSDAILLSDILRVNTEITKAPLSASMIKRYDEHHQDLTLLKALVRQQLPEKYKEIFFDQSKNGYAGYIDGGASQEEFYKFIKPILEKMDGTEELLVKLNREDLLRKQRTFDNGSIPHQIHLGELHAILRRQEDFYPFLKDNREKIEKILTFRIPYYVGPLARGNSRFAWMTRKSEETITPWNFEEVVDKGASAQSFIERMTNFDKNLPNEKVLPKHSLLYEYFTVYNELTKVKYVTEGMRKPAFLSGEQKKAIVDLLFKTNRKVTVKQLKEDYFKKIECFDSVEISGVEDRFNASLGTYHDLLKIIKDKDFLDNEENEDILEDIVLTLTLFEDREMIEERLKTYAHLFDDKVMKQLKRRRYTGWGRLSRKLINGIRDKQSGKTILDFLKSDGFANRNFMQLIHDDSLTFKEDIQKAQVSGQGDSLHEHIANLAGSPAIKKGILQTVKVVDELVKVMGRHKPENIVIEMARENQTTQKGQKNSRERMKRIEEGIKELGSQILKEHPVENTQLQNEKLYLYYLQNGRDMYVDQELDINRLSDYDVDHIVPQSFLKDDSIDNKVLTRSDKNRGKSDNVPSEEVVKKMKNYWRQLLNAKLITQRKFDNLTKAERGGLSELDKAGFIKRQLVETRQITKHVAQILDSRMNTKYDENDKLIREVKVITLKSKLVSDFRKDFQFYKVREINNYHHAHDAYLNAVVGTALIKKYPKLGSSGSETPGTSESATPESSGSEVEFSHEYWMRHALTLAKRARDEREVPVGAVLVLNNRVIGEGWNRAIGLHDPTAHAEIMALRQGGLVMQNYRLIDATLYVTFEPCVMCAGAMIHSRIGRVVFGVRNAKTGAAGSLMDVLHYPGMNHRVEITEGILADECAALLCYFFRMPRQESEFVYGDYKVYDVRKMIAKSEQEIGKATAKYFFYSNIMNFFKTEITLANGEIRKRPLIETNGETGEIVWDKGRDFATVRKVLSMPQVNIVKKTEVQTGGFSKESILPKRNSDKLIARKKDWDPKKYGGFDSPTVAYSVLVVAKVEKGKSKKLKSVKELLGITIMERSSFEKNPIDFLEAKGYKEVKKDLIIKLPKYSLFELENGRKRMLASAGELQKGNELALPSKYVNFLYLASHYEKLKGSPEDNEQKQLFVEQHKHYLDEIIEQISEFSKRVILADANLDKVLSAYNKHRDKPIREQAENIIHLFTLTNLGAPAAFKYFDTTIDRKRYTSTKEVLDATLIHQSITGLYETRIDLSQLGGD

SEQ ID NO: 288 - protein, 1541 aa, Artificial Sequence
  Description of artificial sequence: 115.3 Cas9 TadAins1006 polypeptide sequence
MDKKYSIGLAIGTNSVGWAVITDEYKVPSKKFKVLGNTDRHSIKKNLIGALLFDSGETAEATRLKRTARRRYTRRKNRICYLQEIFSNEMAKVDDSFFHRLEESFLVEEDKKHERHPIFGNIVDEVAYHEKYPTIYHLRKKLVDSTDKADLRLIYLALAHMIKFRGHFLIEGDLNPDNSDVDKLFIQLVQTYNQLFEENPINASGVDAKAILSARLSKSRRLENLIAQLPGEKKNGLFGNLIALSLGLTPNFKSNFDLAEDAKLQLSKDTYDDDLDNLLAQIGDQYADLFLAAKNLSDAILLSDILRVNTEITKAPLSASMIKRYDEHHQDLTLLKALVRQQLPEKYKEIFFDQSKNGYAGYIDGGASQEEFYKFIKPILEKMDGTEELLVKLNREDLLRKQRTFDNGSIPHQIHLGELHAILRRQEDFYPFLKDNREKIEKILTFRIPYYVGPLARGNSRFAWMTRKSEETITPWNFEEVVDKGASAQSFIERMTNFDKNLPNEKVLPKHSLLYEYFTVYNELTKVKYVTEGMRKPAFLSGEQKKAIVDLLFKTNRKVTVKQLKEDYFKKIECFDSVEISGVEDRFNASLGTYHDLLKIIKDKDFLDNEENEDILEDIVLTLTLFEDREMIEERLKTYAHLFDDKVMKQLKRRRYTGWGRLSRKLINGIRDKQSGKTILDFLKSDGFANRNFMQLIHDDSLTFKEDIQKAQVSGQGDSLHEHIANLAGSPAIKKGILQTVKVVDELVKVMGRHKPENIVIEMARENQTTQKGQKNSRERMKRIEEGIKELGSQILKEHPVENTQLQNEKLYLYYLQNGRDMYVDQELDINRLSDYDVDHIVPQSFLKDDSIDNKVLTRSDKNRGKSDNVPSEEVVKKMKNYWRQLLNAKLITQRKFDNLTKAERGGLSELDKAGFIKRQLVETRQITKHVAQILDSRMNTKYDENDKLIREVKVITLKSKLVSDFRKDFQFYKVREINNYHHAHDAYLNAVVGTALIKKYPKLEGSSGSETPGTSESATPESSGSEVEFSHEYWMRHALTLAKRARDEREVPVGAVLVLNNRVIGEGWNRAIGLHDPTAHAEIMALRQGGLVMQNYRLIDATLYVTFEPCVMCAGAMIHSRIGRVVFGVRNAKTGAAGSLMDVLHYPGMNHRVEITEGILADECAALLCYFFRMPRQSEFVYGDYKVYDVRKMIAKSEQEIGKATAKYFFYSNIMNFFKTEITLANGEIRKRPLIETNGETGEIVWDKGRDFATVRKVLSMPQVNIVKKTEVQTGGFSKESILPKRNSDKLIARKKDWDPKKYGGFDSPTVAYSVLVVAKVEKGKSKKLKSVKELLGITIMERSSFEKNPIDFLEAKGYKEVKKDLIIKLPKYSLFELENGRKRMLASAGELQKGNELALPSKYVNFLYLASHYEKLKGSPEDNEQKQLFVEQHKHYLDEIIEQISEFSKRVILADANLDKVLSAYNKHRDKPIREQAENIIHLFTLTNLGAPAAFKYFDTTIDRKRYTSTKEVLDATLIHQSITGLYETRIDLSQLGGD

SEQ ID NO: 289 - protein, 1541 aa, Artificial Sequence
  Description of artificial sequence: 115.4 Cas9 TadAins1007 polypeptide sequence
MDKKYSIGLAIGTNSVGWAVITDEYKVPSKKFKVLGNTDRHSIKKNLIGALLFDSGETAEATRLKRTARRRYTRRKNRICYLQEIFSNEMAKVDDSFFHRLEESFLVEEDKKHERHPIFGNIVDEVAYHEKYPTIYHLRKKLVDSTDKADLRLIYLALAHMIKFRGHFLIEGDLNPDNSDVDKLFIQLVQTYNQLFEENPINASGVDAKAILSARLSKSRRLENLIAQLPGEKKNGLFGNLIALSLGLTPNFKSNFDLAEDAKLQLSKDTYDDDLDNLLAQIGDQYADLFLAAKNLSDAILLSDILRVNTEITKAPLSASMIKRYDEHHQDLTLLKALVRQQLPEKYKEIFFDQSKNGYAGYIDGGASQEEFYKFIKPILEKMDGTEELLVKLNREDLLRKQRTFDNGSIPHQIHLGELHAILRRQEDFYPFLKDNREKIEKILTFRIPYYVGPLARGNSRFAWMTRKSEETITPWNFEEVVDKGASAQSFIERMTNFDKNLPNEKVLPKHSLLYEYFTVYNELTKVKYVTEGMRKPAFLSGEQKKAIVDLLFKTNRKVTVKQLKEDYFKKIECFDSVEISGVEDRFNASLGTYHDLLKIIKDKDFLDNEENEDILEDIVLTLTLFEDREMIEERLKTYAHLFDDKVMKQLKRRRYTGWGRLSRKLINGIRDKQSGKTILDFLKSDGFANRNFMQLIHDDSLTFKEDIQKAQVSGQGDSLHEHIANLAGSPAIKKGILQTVKVVDELVKVMGRHKPENIVIEMARENQTTQKGQKNSRERMKRIEEGIKELGSQILKEHPVENTQLQNEKLYLYYLQNGRDMYVDQELDINRLSDYDVDHIVPQSFLKDDSIDNKVLTRSDKNRGKSDNVPSEEVVKKMKNYWRQLLNAKLITQRKFDNLTKAERGGLSELDKAGFIKRQLVETRQITKHVAQILDSRMNTKYDENDKLIREVKVITLKSKLVSDFRKDFQFYKVREINNYHHAHDAYLNAVVGTALIKKYPKLESGSSGSETPGTSESATPESSGSEVEFSHEYWMRHALTLAKRARDEREVPVGAVLVLNNRVIGEGWNRAIGLHDPTAHAEIMALRQGGLVMQNYRLIDATLYVTFEPCVMCAGAMIHSRIGRVVFGVRNAKTGAAGSLMDVLHYPGMNHRVEITEGILADECAALLCYFFRMPRQEFVYGDYKVYDVRKMIAKSEQEIGKATAKYFFYSNIMNFFKTEITLANGEIRKRPLIETNGETGEIVWDKGRDFATVRKVLSMPQVNIVKKTEVQTGGFSKESILPKRNSDKLIARKKDWDPKKYGGFDSPTVAYSVLVVAKVEKGKSKKLKSVKELLGITIMERSSFEKNPIDFLEAKGYKEVKKDLIIKLPKYSLFELENGRKRMLASAGELQKGNELALPSKYVNFLYLASHYEKLKGSPEDNEQKQLFVEQHKHYLDEIIEQISEFSKRVILADANLDKVLSAYNKHRDKPIREQAENIIHLFTLTNLGAPAAFKYFDTTIDRKRYTSTKEVLDATLIHQSITGLYETRIDLSQLGGD

SEQ ID NO: 290 - protein, 1541 aa, Artificial Sequence
  Description of artificial sequence: 116.1 Cas9 TadAins C-term truncate2 792 polypeptide sequence
MDKKYSIGLAIGTNSVGWAVITDEYKVPSKKFKVLGNTDRHSIKKNLIGALLFDSGETAEATRLKRTARRRYTRRKNRICYLQEIFSNEMAKVDDSFFHRLEESFLVEEDKKHERHPIFGNIVDEVAYHEKYPTIYHLRKKLVDSTDKADLRLIYLALAHMIKFRGHFLIEGDLNPDNSDVDKLFIQLVQTYNQLFEENPINASGVDAKAILSARLSKSRRLENLIAQLPGEKKNGLFGNLIALSLGLTPNFKSNFDLAEDAKLQLSKDTYDDDLDNLLAQIGDQYADLFLAAKNLSDAILLSDILRVNTEITKAPLSASMIKRYDEHHQDLTLLKALVRQQLPEKYKEIFFDQSKNGYAGYIDGGASQEEFYKFIKPILEKMDGTEELLVKLNREDLLRKQRTFDNGSIPHQIHLGELHAILRRQEDFYPFLKDNREKIEKILTFRIPYYVGPLARGNSRFAWMTRKSEETITPWNFEEVVDKGASAQSFIERMTNFDKNLPNEKVLPKHSLLYEYFTVYNELTKVKYVTEGMRKPAFLSGEQKKAIVDLLFKTNRKVTVKQLKEDYFKKIECFDSVEISGVEDRFNASLGTYHDLLKIIKDKDFLDNEENEDILEDIVLTLTLFEDREMIEERLKTYAHLFDDKVMKQLKRRRYTGWGRLSRKLINGIRDKQSGKTILDFLKSDGFANRNFMQLIHDDSLTFKEDIQKAQVSGQGDSLHEHIANLAGSPAIKKGILQTVKVVDELVKVMGRHKPENIVIEMARENQTTQKGQKNSRERMKRIEEGIKELGGSSGSETPGTSESATPESSGSEVEFSHEYWMRHALTLAKRARDEREVPVGAVLVLNNRVIGEGWNRAIGLHDPTAHAEIMALRQGGLVMQNYRLIDATLYVTFEPCVMCAGAMIHSRIGRVVFGVRNAKTGAAGSLMDVLHYPGMNHRVEITEGILADECAALLCYFFRMPRQSQILKEHPVENTQLQNEKLYLYYLQNGRDMYVDQELDINRLSDYDVDHIVPQSFLKDDSIDNKVLTRSDKNRGKSDNVPSEEVVKKMKNYWRQLLNAKLITQRKFDNLTKAERGGLSELDKAGFIKRQLVETRQITKHVAQILDSRMNTKYDENDKLIREVKVITLKSKLVSDFRKDFQFYKVREINNYHHAHDAYLNAVVGTALIKKYPKLESEFVYGDYKVYDVRKMIAKSEQEIGKATAKYFFYSNIMNFFKTEITLANGEIRKRPLIETNGETGEIVWDKGRDFATVRKVLSMPQVNIVKKTEVQTGGFSKESILPKRNSDKLIARKKDWDPKKYGGFDSPTVAYSVLVVAKVEKGKSKKLKSVKELLGITIMERSSFEKNPIDFLEAKGYKEVKKDLIIKLPKYSLFELENGRKRMLASAGELQKGNELALPSKYVNFLYLASHYEKLKGSPEDNEQKQLFVEQHKHYLDEIIEQISEFSKRVILADANLDKVLSAYNKHRDKPIREQAENIIHLFTLTNLGAPAAFKYFDTTIDRKRYTSTKEVLDATLIHQSITGLYETRIDLSQLGGD

SEQ ID NO: 291 - protein, 1541 aa, Artificial Sequence
  Description of artificial sequence: 116.2 Cas9 TadAins C-term truncate2 791 polypeptide sequence
MDKKYSIGLAIGTNSVGWAVITDEYKVPSKKFKVLGNTDRHSIKKNLIGALLFDSGETAEATRLKRTARRRYTRRKNRICYLQEIFSNEMAKVDDSFFHRLEESFLVEEDKKHERHPIFGNIVDEVAYHEKYPTIYHLRKKLVDSTDKADLRLIYLALAHMIKFRGHFLIEGDLNPDNSDVDKLFIQLVQTYNQLFEENPINASGVDAKAILSARLSKSRRLENLIAQLPGEKKNGLFGNLIALSLGLTPNFKSNFDLAEDAKLQLSKDTYDDDLDNLLAQIGDQYADLFLAAKNLSDAILLSDILRVNTEITKAPLSASMIKRYDEHHQDLTLLKALVRQQLPEKYKEIFFDQSKNGYAGYIDGGASQEEFYKFIKPILEKMDGTEELLVKLNREDLLRKQRTFDNGSIPHQIHLGELHAILRRQEDFYPFLKDNREKIEKILTFRIPYYVGPLARGNSRFAWMTRKSEETITPWNFEEVVDKGASAQSFIERMTNFDKNLPNEKVLPKHSLLYEYFTVYNELTKVKYVTEGMRKPAFLSGEQKKAIVDLLFKTNRKVTVKQLKEDYFKKIECFDSVEISGVEDRFNASLGTYHDLLKIIKDKDFLDNEENEDILEDIVLTLTLFEDREMIEERLKTYAHLFDDKVMKQLKRRRYTGWGRLSRKLINGIRDKQSGKTILDFLKSDGFANRNFMQLIHDDSLTFKEDIQKAQVSGQGDSLHEHIANLAGSPAIKKGILQTVKVVDELVKVMGRHKPENIVIEMARENQTTQKGQKNSRERMKRIEEGIKELGSSGSETPGTSESATPESSGSEVEFSHEYWMRHALTLAKRARDEREVPVGAVLVLNNRVIGEGWNRAIGLHDPTAHAEIMALRQGGLVMQNYRLIDATLYVTFEPCVMCAGAMIHSRIGRVVFGVRNAKTGAAGSLMDVLHYPGMNHRVEITEGILADECAALLCYFFRMPRQGSQILKEHPVENTQLQNEKLYLYYLQNGRDMYVDQELDINRLSDYDVDHIVPQSFLKDDSIDNKVLTRSDKNRGKSDNVPSEEVVKKMKNYWRQLLNAKLITQRKFDNLTKAERGGLSELDKAGFIKRQLVETRQITKHVAQILDSRMNTKYDENDKLIREVKVITLKSKLVSDFRKDFQFYKVREINNYHHAHDAYLNAVVGTALIKKYPKLESEFVYGDYKVYDVRKMIAKSEQEIGKATAKYFFYSNIMNFFKTEITLANGEIRKRPLIETNGETGEIVWDKGRDFATVRKVLSMPQVNIVKKTEVQTGGFSKESILPKRNSDKLIARKKDWDPKKYGGFDSPTVAYSVLVVAKVEKGKSKKLKSVKELLGITIMERSSFEKNPIDFLEAKGYKEVKKDLIIKLPKYSLFELENGRKRMLASAGELQKGNELALPSKYVNFLYLASHYEKLKGSPEDNEQKQLFVEQHKHYLDEIIEQISEFSKRVILADANLDKVLSAYNKHRDKPIREQAENIIHLFTLTNLGAPAAFKYFDTTIDRKRYTSTKEVLDATLIHQSITGLYETRIDLSQLGGD

SEQ ID NO: 292 - protein, 1541 aa, Artificial Sequence
  Description of artificial sequence: 116.3 Cas9 TadAins C-term truncate2 790 polypeptide sequence
MDKKYSIGLAIGTNSVGWAVITDEYKVPSKKFKVLGNTDRHSIKKNLIGALLFDSGETAEATRLKRTARRRYTRRKNRICYLQEIFSNEMAKVDDSFFHRLEESFLVEEDKKHERHPIFGNIVDEVAYHEKYPTIYHLRKKLVDSTDKADLRLIYLALAHMIKFRGHFLIEGDLNPDNSDVDKLFIQLVQTYNQLFEENPINASGVDAKAILSARLSKSRRLENLIAQLPGEKKNGLFGNLIALSLGLTPNFKSNFDLAEDAKLQLSKDTYDDDLDNLLAQIGDQYADLFLAAKNLSDAILLSDILRVNTEITKAPLSASMIKRYDEHHQDLTLLKALVRQQLPEKYKEIFFDQSKNGYAGYIDGGASQEEFYKFIKPILEKMDGTEELLVKLNREDLLRKQRTFDNGSIPHQIHLGELHAILRRQEDFYPFLKDNREKIEKILTFRIPYYVGPLARGNSRFAWMTRKSEETITPWNFEEVVDKGASAQSFIERMTNFDKNLPNEKVLPKHSLLYEYFTVYNELTKVKYVTEGMRKPAFLSGEQKKAIVDLLFKTNRKVTVKQLKEDYFKKIECFDSVEISGVEDRFNASLGTYHDLLKIIKDKDFLDNEENEDILEDIVLTLTLFEDREMIEERLKTYAHLFDDKVMKQLKRRRYTGWGRLSRKLINGIRDKQSGKTILDFLKSDGFANRNFMQLIHDDSLTFKEDIQKAQVSGQGDSLHEHIANLAGSPAIKKGILQTVKVVDELVKVMGRHKPENIVIEMARENQTTQKGQKNSRERMKRIEEGIKEGSSGSETPGTSESATPESSGSEVEFSHEYWMRHALTLAKRARDEREVPVGAVLVLNNRVIGEGWNRAIGLHDPTAHAEIMALRQGGLVMQNYRLIDATLYVTFEPCVMCAGAMIHSRIGRVVFGVRNAKTGAAGSLMDVLHYPGMNHRVEITEGILADECAALLCYFFRMPRQLGSQILKEHPVENTQLQNEKLYLYYLQNGRDMYVDQELDINRLSDYDVDHIVPQSFLKDDSIDNKVLTRSDKNRGKSDNVPSEEVVKKMKNYWRQLLNAKLITQRKFDNLTKAERGGLSELDKAGFIKRQLVETRQITKHVAQILDSRMNTKYDENDKLIREVKVITLKSKLVSDFRKDFQFYKVREINNYHHAHDAYLNAVVGTALIKKYPKLESEFVYGDYKVYDVRKMIAKSEQEIGKATAKYFFYSNIMNFFKTEITLANGEIRKRPLIETNGETGEIVWDKGRDFATVRKVLSMPQVNIVKKTEVQTGGFSKESILPKRNSDKLIARKKDWDPKKYGGFDSPTVAYSVLVVAKVEKGKSKKLKSVKELLGITIMERSSFEKNPIDFLEAKGYKEVKKDLIIKLPKYSLFELENGRKRMLASAGELQKGNELALPSKYVNFLYLASHYEKLKGSPEDNEQKQLFVEQHKHYLDEIIEQISEFSKRVILADANLDKVLSAYNKHRDKPIREQAENIIHLFTLTNLGAPAAFKYFDTTIDRKRYTSTKEVLDATLIHQSITGLYETRIDLSQLGGD

SEQ ID NO: 293 - protein, 1484 aa, Artificial Sequence
  Description of artificial sequence: 117 Cas9 delta 1017-1069 polypeptide sequence
MDKKYSIGLAIGTNSVGWAVITDEYKVPSKKFKVLGNTDRHSIKKNLIGALLFDSGETAEATRLKRTARRRYTRRKNRICYLQEIFSNEMAKVDDSFFHRLEESFLVEEDKKHERHPIFGNIVDEVAYHEKYPTIYHLRKKLVDSTDKADLRLIYLALAHMIKFRGHFLIEGDLNPDNSDVDKLFIQLVQTYNQLFEENPINASGVDAKAILSARLSKSRRLENLIAQLPGEKKNGLFGNLIALSLGLTPNFKSNFDLAEDAKLQLSKDTYDDDLDNLLAQIGDQYADLFLAAKNLSDAILLSDILRVNTEITKAPLSASMIKRYDEHHQDLTLLKALVRQQLPEKYKEIFFDQSKNGYAGYIDGGASQEEFYKFIKPILEKMDGTEELLVKLNREDLLRKQRTFDNGSIPHQIHLGELHAILRRQEDFYPFLKDNREKIEKILTFRIPYYVGPLARGNSRFAWMTRKSEETITPWNFEEVVDKGASAQSFIERMTNFDKNLPNEKVLPKHSLLYEYFTVYNELTKVKYVTEGMRKPAFLSGEQKKAIVDLLFKTNRKVTVKQLKEDYFKKIECFDSVEISGVEDRFNASLGTYHDLLKIIKDKDFLDNEENEDILEDIVLTLTLFEDREMIEERLKTYAHLFDDKVMKQLKRRRYTGWGRLSRKLINGIRDKQSGKTILDFLKSDGFANRNFMQLIHDDSLTFKEDIQKAQVSGQGDSLHEHIANLAGSPAIKKGILQTVKVVDELVKVMGRHKPENIVIEMARENQTTQKGQKNSRERMKRIEEGIKELGSQILKEHPVENTQLQNEKLYLYYLQNGRDMYVDQELDINRLSDYDVDHIVPQSFLKDDSIDNKVLTRSDKNRGKSDNVPSEEVVKKMKNYWRQLLNAKLITQRKFDNLTKAERGGLSELDKAGFIKRQLVETRQITKHVAQILDSRMNTKYDENDKLIREVKVITLKSKLVSDFRKDFQFYKVREINNYHHAHDAYLNAVVGTALIKKYPKLESEFVYGDYKVYSSGSEVEFSHEYWMRHALTLAKRARDEREVPVGAVLVLNNRVIGEGWNRAIGLHDPTAHAEIMALRQGGLVMQNYRLIDATLYVTFEPCVMCAGAMIHSRIGRVVFGVRNAKTGAAGSLMDVLHYPGMNHRVEITEGILADECAALLCYFFRMPRQVFNAQKKAQSSTDGEIVWDKGRDFATVRKVLSMPQVNIVKKTEVQTGGFSKESILPKRNSDKLIARKKDWDPKKYGGFDSPTVAYSVLVVAKVEKGKSKKLKSVKELLGITIMERSSFEKNPIDFLEAKGYKEVKKDLIIKLPKYSLFELENGRKRMLASAGELQKGNELALPSKYVNFLYLASHYEKLKGSPEDNEQKQLFVEQHKHYLDEIIEQISEFSKRVILADANLDKVLSAYNKHRDKPIREQAENIIHLFTLTNLGAPAAFKYFDTTIDRKRYTSTKEVLDATLIHQSITGLYETRIDLSQLGGD

SEQ ID NO: 294 - protein, 1554 aa, Artificial Sequence
  Description of artificial sequence: 118 Cas9 TadA-CP116ins 1067 polypeptide sequence
MDKKYSIGLAIGTNSVGWAVITDEYKVPSKKFKVLGNTDRHSIKKNLIGALLFDSGETAEATRLKRTARRRYTRRKNRICYLQEIFSNEMAKVDDSFFHRLEESFLVEEDKKHERHPIFGNIVDEVAYHEKYPTIYHLRKKLVDSTDKADLRLIYLALAHMIKFRGHFLIEGDLNPDNSDVDKLFIQLVQTYNQLFEENPINASGVDAKAILSARLSKSRRLENLIAQLPGEKKNGLFGNLIALSLGLTPNFKSNFDLAEDAKLQLSKDTYDDDLDNLLAQIGDQYADLFLAAKNLSDAILLSDILRVNTEITKAPLSASMIKRYDEHHQDLTLLKALVRQQLPEKYKEIFFDQSKNGYAGYIDGGASQEEFYKFIKPILEKMDGTEELLVKLNREDLLRKQRTFDNGSIPHQIHLGELHAILRRQEDFYPFLKDNREKIEKILTFRIPYYVGPLARGNSRFAWMTRKSEETITPWNFEEVVDKGASAQSFIERMTNFDKNLPNEKVLPKHSLLYEYFTVYNELTKVKYVTEGMRKPAFLSGEQKKAIVDLLFKTNRKVTVKQLKEDYFKKIECFDSVEISGVEDRFNASLGTYHDLLKIIKDKDFLDNEENEDILEDIVLTLTLFEDREMIEERLKTYAHLFDDKVMKQLKRRRYTGWGRLSRKLINGIRDKQSGKTILDFLKSDGFANRNFMQLIHDDSLTFKEDIQKAQVSGQGDSLHEHIANLAGSPAIKKGILQTVKVVDELVKVMGRHKPENIVIEMARENQTTQKGQKNSRERMKRIEEGIKELGSQILKEHPVENTQLQNEKLYLYYLQNGRDMYVDQELDINRLSDYDVDHIVPQSFLKDDSIDNKVLTRSDKNRGKSDNVPSEEVVKKMKNYWRQLLNAKLITQRKFDNLTKAERGGLSELDKAGFIKRQLVETRQITKHVAQILDSRMNTKYDENDKLIREVKVITLKSKLVSDFRKDFQFYKVREINNYHHAHDAYLNAVVGTALIKKYPKLESEFVYGDYKVYDVRKMIAKSEQEIGKATAKYFFYSNIMNFFKTEITLANGEIRKRPLIETNMNHRVEITEGILADECAALLCYFFRMPRQVFNAQKKAQSSTDGSSGSETPGTSESATPESSGSEVEFSHEYWMRHALTLAKRARDEREVPVGAVLVLNNRVIGEGWNRAIGLHDPTAHAEIMALRQGGLVMQNYRLIDATLYVTFEPCVMCAGAMIHSRIGRVVFGVRNAKTGAAGSLMDVLHYPGGETGEIVWDKGRDFATVRKVLSMPQVNIVKKTEVQTGGFSKESILPKRNSDKLIARKKDWDPKKYGGFDSPTVAYSVLVVAKVEKGKSKKLKSVKELLGITIMERSSFEKNPIDFLEAKGYKEVKKDLIIKLPKYSLFELENGRKRMLASAGELQKGNELALPSKYVNFLYLASHYEKLKGSPEDNEQKQLFVEQHKHYLDEIIEQISEFSKRVILADANLDKVLSAYNKHRDKPIREQAENIIHLFTLTNLGAPAAFKYFDTTIDRKRYTSTKEVLDATLIHQSITGLYETRIDLSQLGGD

SEQ ID NO: 295 - protein, 1554 aa, Artificial Sequence
  Description of artificial sequence: 119 Cas9 TadAins 701 polypeptide sequence
MDKKYSIGLAIGTNSVGWAVITDEYKVPSKKFKVLGNTDRHSIKKNLIGALLFDSGETAEATRLKRTARRRYTRRKNRICYLQEIFSNEMAKVDDSFFHRLEESFLVEEDKKHERHPIFGNIVDEVAYHEKYPTIYHLRKKLVDSTDKADLRLIYLALAHMIKFRGHFLIEGDLNPDNSDVDKLFIQLVQTYNQLFEENPINASGVDAKAILSARLSKSRRLENLIAQLPGEKKNGLFGNLIALSLGLTPNFKSNFDLAEDAKLQLSKDTYDDDLDNLLAQIGDQYADLFLAAKNLSDAILLSDILRVNTEITKAPLSASMIKRYDEHHQDLTLLKALVRQQLPEKYKEIFFDQSKNGYAGYIDGGASQEEFYKFIKPILEKMDGTEELLVKLNREDLLRKQRTFDNGSIPHQIHLGELHAILRRQEDFYPFLKDNREKIEKILTFRIPYYVGPLARGNSRFAWMTRKSEETITPWNFEEVVDKGASAQSFIERMTNFDKNLPNEKVLPKHSLLYEYFTVYNELTKVKYVTEGMRKPAFLSGEQKKAIVDLLFKTNRKVTVKQLKEDYFKKIECFDSVEISGVEDRFNASLGTYHDLLKIIKDKDFLDNEENEDILEDIVLTLTLFEDREMIEERLKTYAHLFDDKVMKQLKRRRYTGWGRLSRKLINGIRDKQSGKTILDFLKSDGFANRNFMQLIHDDSGSSGSETPGTSESATPESSGSEVEFSHEYWMRHALTLAKRARDEREVPVGAVLVLNNRVIGEGWNRAIGLHDPTAHAEIMALRQGGLVMQNYRLIDATLYVTFEPCVMCAGAMIHSRIGRVVFGVRNAKTGAAGSLMDVLHYPGMNHRVEITEGILADECAALLCYFFRMPRQVFNAQKKAQSSTDLTFKEDIQKAQVSGQGDSLHEHIANLAGSPAIKKGILQTVKVVDELVKVMGRHKPENIVIEMARENQTTQKGQKNSRERMKRIEEGIKELGSQILKEHPVENTQLQNEKLYLYYLQNGRDMYVDQELDINRLSDYDVDHIVPQSFLKDDSIDNKVLTRSDKNRGKSDNVPSEEVVKKMKNYWRQLLNAKLITQRKFDNLTKAERGGLSELDKAGFIKRQLVETRQITKHVAQILDSRMNTKYDENDKLIREVKVITLKSKLVSDFRKDFQFYKVREINNYHHAHDAYLNAVVGTALIKKYPKLESEFVYGDYKVYDVRKMIAKSEQEIGKATAKYFFYSNIMNFFKTEITLANGEIRKRPLIETNGETGEIVWDKGRDFATVRKVLSMPQVNIVKKTEVQTGGFSKESILPKRNSDKLIARKKDWDPKKYGGFDSPTVAYSVLVVAKVEKGKSKKLKSVKELLGITIMERSSFEKNPIDFLEAKGYKEVKKDLIIKLPKYSLFELENGRKRMLASAGELQKGNELALPSKYVNFLYLASHYEKLKGSPEDNEQKQLFVEQHKHYLDEIIEQISEFSKRVILADANLDKVLSAYNKHRDKPIREQAENIIHLFTLTNLGAPAAFKYFDTTIDRKRYTSTKEVLDATLIHQSITGLYETRIDLSQLGGD

SEQ ID NO: 296 - protein, 1554 aa, Artificial Sequence
  Description of artificial sequence: 120 Cas9 TadACP136ins 1248 polypeptide sequence
MDKKYSIGLAIGTNSVGWAVITDEYKVPSKKFKVLGNTDRHSIKKNLIGALLFDSGETAEATRLKRTARRRYTRRKNRICYLQEIFSNEMAKVDDSFFHRLEESFLVEEDKKHERHPIFGNIVDEVAYHEKYPTIYHLRKKLVDSTDKADLRLIYLALAHMIKFRGHFLIEGDLNPDNSDVDKLFIQLVQTYNQLFEENPINASGVDAKAILSARLSKSRRLENLIAQLPGEKKNGLFGNLIALSLGLTPNFKSNFDLAEDAKLQLSKDTYDDDLDNLLAQIGDQYADLFLAAKNLSDAILLSDILRVNTEITKAPLSASMIKRYDEHHQDLTLLKALVRQQLPEKYKEIFFDQSKNGYAGYIDGGASQEEFYKFIKPILEKMDGTEELLVKLNREDLLRKQRTFDNGSIPHQIHLGELHAILRRQEDFYPFLKDNREKIEKILTFRIPYYVGPLARGNSRFAWMTRKSEETITPWNFEEVVDKGASAQSFIERMTNFDKNLPNEKVLPKHSLLYEYFTVYNELTKVKYVTEGMRKPAFLSGEQKKAIVDLLFKTNRKVTVKQLKEDYFKKIECFDSVEISGVEDRFNASLGTYHDLLKIIKDKDFLDNEENEDILEDIVLTLTLFEDREMIEERLKTYAHLFDDKVMKQLKRRRYTGWGRLSRKLINGIRDKQSGKTILDFLKSDGFANRNFMQLIHDDSLTFKEDIQKAQVSGQGDSLHEHIANLAGSPAIKKGILQTVKVVDELVKVMGRHKPENIVIEMARENQTTQKGQKNSRERMKRIEEGIKELGSQILKEHPVENTQLQNEKLYLYYLQNGRDMYVDQELDINRLSDYDVDHIVPQSFLKDDSIDNKVLTRSDKNRGKSDNVPSEEVVKKMKNYWRQLLNAKLITQRKFDNLTKAERGGLSELDKAGFIKRQLVETRQITKHVAQILDSRMNTKYDENDKLIREVKVITLKSKLVSDFRKDFQFYKVREINNYHHAHDAYLNAVVGTALIKKYPKLESEFVYGDYKVYDVRKMIAKSEQEIGKATAKYFFYSNIMNFFKTEITLANGEIRKRPLIETNGETGEIVWDKGRDFATVRKVLSMPQVNIVKKTEVQTGGFSKESILPKRNSDKLIARKKDWDPKKYGGFDSPTVAYSVLVVAKVEKGKSKKLKSVKELLGITIMERSSFEKNPIDFLEAKGYKEVKKDLIIKLPKYSLFELENGRKRMLASAGELQKGNELALPSKYVNFLYLASHYEKLKGSMNHRVEITEGILADECAALLCYFFRMPRQVFNAQKKAQSSTDGSSGSETPGTSESATPESSGSEVEFSHEYWMRHALTLAKRARDEREVPVGAVLVLNNRVIGEGWNRAIGLHDPTAHAEIMALRQGGLVMQNYRLIDATLYVTFEPCVMCAGAMIHSRIGRVVFGVRNAKTGAAGSLMDVLHYPGPEDNEQKQLFVEQHKHYLDEIIEQISEFSKRVILADANLDKVLSAYNKHRDKPIREQAENIIHLFTLTNLGAPAAFKYFDTTIDRKRYTSTKEVLDATLIHQSITGLYETRIDLSQLGGD

SEQ ID NO: 297 - protein, 1554 aa, Artificial Sequence
  Description of artificial sequence: 121 Cas9 TadACP136ins 1052 polypeptide sequence
MDKKYSIGLAIGTNSVGWAVITDEYKVPSKKFKVLGNTDRHSIKKNLIGALLFDSGETAEATRLKRTARRRYTRRKNRICYLQEIFSNEMAKVDDSFFHRLEESFLVEEDKKHERHPIFGNIVDEVAYHEKYPTIYHLRKKLVDSTDKADLRLIYLALAHMIKFRGHFLIEGDLNPDNSDVDKLFIQLVQTYNQLFEENPINASGVDAKAILSARLSKSRRLENLIAQLPGEKKNGLFGNLIALSLGLTPNFKSNFDLAEDAKLQLSKDTYDDDLDNLLAQIGDQYADLFLAAKNLSDAILLSDILRVNTEITKAPLSASMIKRYDEHHQDLTLLKALVRQQLPEKYKEIFFDQSKNGYAGYIDGGASQEEFYKFIKPILEKMDGTEELLVKLNREDLLRKQRTFDNGSIPHQIHLGELHAILRRQEDFYPFLKDNREKIEKILTFRIPYYVGPLARGNSRFAWMTRKSEETITPWNFEEVVDKGASAQSFIERMTNFDKNLPNEKVLPKHSLLYEYFTVYNELTKVKYVTEGMRKPAFLSGEQKKAIVDLLFKTNRKVTVKQLKEDYFKKIECFDSVEISGVEDRFNASLGTYHDLLKIIKDKDFLDNEENEDILEDIVLTLTLFEDREMIEERLKTYAHLFDDKVMKQLKRRRYTGWGRLSRKLINGIRDKQSGKTILDFLKSDGFANRNFMQLIHDDSLTFKEDIQKAQVSGQGDSLHEHIANLAGSPAIKKGILQTVKVVDELVKVMGRHKPENIVIEMARENQTTQKGQKNSRERMKRIEEGIKELGSQILKEHPVENTQLQNEKLYLYYLQNGRDMYVDQELDINRLSDYDVDHIVPQSFLKDDSIDNKVLTRSDKNRGKSDNVPSEEVVKKMKNYWRQLLNAKLITQRKFDNLTKAERGGLSELDKAGFIKRQLVETRQITKHVAQILDSRMNTKYDENDKLIREVKVITLKSKLVSDFRKDFQFYKVREINNYHHAHDAYLNAVVGTALIKKYPKLESEFVYGDYKVYDVRKMIAKSEQEIGKATAKYFFYSNIMNFFKTEITLAMNHRVEITEGILADECAALLCYFFRMPRQVFNAQKKAQSSTDGSSGSETPGTSESATPESSGSEVEFSHEYWMRHALTLAKRARDEREVPVGAVLVLNNRVIGEGWNRAIGLHDPTAHAEIMALRQGGLVMQNYRLIDATLYVTFEPCVMCAGAMIHSRIGRVVFGVRNAKTGAAGSLMDVLHYPGNGEIRKRPLIETNGETGEIVWDKGRDFATVRKVLSMPQVNIVKKTEVQTGGFSKESILPKRNSDKLIARKKDWDPKKYGGFDSPTVAYSVLVVAKVEKGKSKKLKSVKELLGITIMERSSFEKNPIDFLEAKGYKEVKKDLIIKLPKYSLFELENGRKRMLASAGELQKGNELALPSKYVNFLYLASHYEKLKGSPEDNEQKQLFVEQHKHYLDEIIEQISEFSKRVILADANLDKVLSAYNKHRDKPIREQAENIIHLFTLTNLGAPAAFKYFDTTIDRKRYTSTKEVLDATLIHQSITGLYETRIDLSQLGGD

SEQ ID NO: 298 - protein, 1554 aa, Artificial Sequence
  Description of artificial sequence: 122 Cas9 TadACP136ins 1041 polypeptide sequence
MDKKYSIGLAIGTNSVGWAVITDEYKVPSKKFKVLGNTDRHSIKKNLIGALLFDSGETAEATRLKRTARRRYTRRKNRICYLQEIFSNEMAKVDDSFFHRLEESFLVEEDKKHERHPIFGNIVDEVAYHEKYPTIYHLRKKLVDSTDKADLRLIYLALAHMIKFRGHFLIEGDLNPDNSDVDKLFIQLVQTYNQLFEENPINASGVDAKAILSARLSKSRRLENLIAQLPGEKKNGLFGNLIALSLGLTPNFKSNFDLAEDAKLQLSKDTYDDDLDNLLAQIGDQYADLFLAAKNLSDAILLSDILRVNTEITKAPLSASMIKRYDEHHQDLTLLKALVRQQLPEKYKEIFFDQSKNGYAGYIDGGASQEEFYKFIKPILEKMDGTEELLVKLNREDLLRKQRTFDNGSIPHQIHLGELHAILRRQEDFYPFLKDNREKIEKILTFRIPYYVGPLARGNSRFAWMTRKSEETITPWNFEEVVDKGASAQSFIERMTNFDKNLPNEKVLPKHSLLYEYFTVYNELTKVKYVTEGMRKPAFLSGEQKKAIVDLLFKTNRKVTVKQLKEDYFKKIECFDSVEISGVEDRFNASLGTYHDLLKIIKDKDFLDNEENEDILEDIVLTLTLFEDREMIEERLKTYAHLFDDKVMKQLKRRRYTGWGRLSRKLINGIRDKQSGKTILDFLKSDGFANRNFMQLIHDDSLTFKEDIQKAQVSGQGDSLHEHIANLAGSPAIKKGILQTVKVVDELVKVMGRHKPENIVIEMARENQTTQKGQKNSRERMKRIEEGIKELGSQILKEHPVENTQLQNEKLYLYYLQNGRDMYVDQELDINRLSDYDVDHIVPQSFLKDDSIDNKVLTRSDKNRGKSDNVPSEEVVKKMKNYWRQLLNAKLITQRKFDNLTKAERGGLSELDKAGFIKRQLVETRQITKHVAQILDSRMNTKYDENDKLIREVKVITLKSKLVSDFRKDFQFYKVREINNYHHAHDAYLNAVVGTALIKKYPKLESEFVYGDYKVYDVRKMIAKSEQEIGKATAKYFFYSMNHRVEITEGILADECAALLCYFFRMPRQVFNAQKKAQSSTDGSSGSETPGTSESATPESSGSEVEFSHEYWMRHALTLAKRARDEREVPVGAVLVLNNRVIGEGWNRAIGLHDPTAHAEIMALRQGGLVMQNYRLIDATLYVTFEPCVMCAGAMIHSRIGRVVFGVRNAKTGAAGSLMDVLHYPGNIMNFFKTEITLANGEIRKRPLIETNGETGEIVWDKGRDFATVRKVLSMPQVNIVKKTEVQTGGFSKESILPKRNSDKLIARKKDWDPKKYGGFDSPTVAYSVLVVAKVEKGKSKKLKSVKELLGITIMERSSFEKNPIDFLEAKGYKEVKKDLIIKLPKYSLFELENGRKRMLASAGELQKGNELALPSKYVNFLYLASHYEKLKGSPEDNEQKQLFVEQHKHYLDEIIEQISEFSKRVILADANLDKVLSAYNKHRDKPIREQAENIIHLFTLTNLGAPAAFKYFDTTIDRKRYTSTKEVLDATLIHQSITGLYETRIDLSQLGGD

SEQ ID NO: 299 - protein, 1554 aa, Artificial Sequence
  Description of artificial sequence: 123 Cas9 TadACP139ins 1299 polypeptide sequence
MDKKYSIGLAIGTNSVGWAVITDEYKVPSKKFKVLGNTDRHSIKKNLIGALLFDSGETAEATRLKRTARRRYTRRKNRICYLQEIFSNEMAKVDDSFFHRLEESFLVEEDKKHERHPIFGNIVDEVAYHEKYPTIYHLRKKLVDSTDKADLRLIYLALAHMIKFRGHFLIEGDLNPDNSDVDKLFIQLVQTYNQLFEENPINASGVDAKAILSARLSKSRRLENLIAQLPGEKKNGLFGNLIALSLGLTPNFKSNFDLAEDAKLQLSKDTYDDDLDNLLAQIGDQYADLFLAAKNLSDAILLSDILRVNTEITKAPLSASMIKRYDEHHQDLTLLKALVRQQLPEKYKEIFFDQSKNGYAGYIDGGASQEEFYKFIKPILEKMDGTEELLVKLNREDLLRKQRTFDNGSIPHQIHLGELHAILRRQEDFYPFLKDNREKIEKILTFRIPYYVGPLARGNSRFAWMTRKSEETITPWNFEEVVDKGASAQSFIERMTNFDKNLPNEKVLPKHSLLYEYFTVYNELTKVKYVTEGMRKPAFLSGEQKKAIVDLLFKTNRKVTVKQLKEDYFKKIECFDSVEISGVEDRFNASLGTYHDLLKIIKDKDFLDNEENEDILEDIVLTLTLFEDREMIEERLKTYAHLFDDKVMKQLKRRRYTGWGRLSRKLINGIRDKQSGKTILDFLKSDGFANRNFMQLIHDDSLTFKEDIQKAQVSGQGDSLHEHIANLAGSPAIKKGILQTVKVVDELVKVMGRHKPENIVIEMARENQTTQKGQKNSRERMKRIEEGIKELGSQILKEHPVENTQLQNEKLYLYYLQNGRDMYVDQELDINRLSDYDVDHIVPQSFLKDDSIDNKVLTRSDKNRGKSDNVPSEEVVKKMKNYWRQLLNAKLITQRKFDNLTKAERGGLSELDKAGFIKRQLVETRQITKHVAQILDSRMNTKYDENDKLIREVKVITLKSKLVSDFRKDFQFYKVREINNYHHAHDAYLNAVVGTALIKKYPKLESEFVYGDYKVYDVRKMIAKSEQEIGKATAKYFFYSNIMNFFKTEITLANGEIRKRPLIETNGETGEIVWDKGRDFATVRKVLSMPQVNIVKKTEVQTGGFSKESILPKRNSDKLIARKKDWDPKKYGGFDSPTVAYSVLVVAKVEKGKSKKLKSVKELLGITIMERSSFEKNPIDFLEAKGYKEVKKDLIIKLPKYSLFELENGRKRMLASAGELQKGNELALPSKYVNFLYLASHYEKLKGSPEDNEQKQLFVEQHKHYLDEIIEQISEFSKRVILADANLDKVLSAYNKHRMNHRVEITEGILADECAALLCYFFRMPRQVFNAQKKAQSSTDGSSGSETPGTSESATPESSGSEVEFSHEYWMRHALTLAKRARDEREVPVGAVLVLNNRVIGEGWNRAIGLHDPTAHAEIMALRQGGLVMQNYRLIDATLYVTFEPCVMCAGAMIHSRIGRVVFGVRNAKTGAAGSLMDVLHYPGDKPIREQAENIIHLFTLTNLGAPAAFKYFDTTIDRKRYTSTKEVLDATLIHQSITGLYETRIDLSQLGGD

SEQ ID NO: 300 - protein, 1454 aa, Artificial Sequence
  Description of artificial sequence: 124 Cas9 delta 792-872 TadAins polypeptide sequence
MDKKYSIGLAIGTNSVGWAVITDEYKVPSKKFKVLGNTDRHSIKKNLIGALLFDSGETAEATRLKRTARRRYTRRKNRICYLQEIFSNEMAKVDDSFFHRLEESFLVEEDKKHERHPIFGNIVDEVAYHEKYPTIYHLRKKLVDSTDKADLRLIYLALAHMIKFRGHFLIEGDLNPDNSDVDKLFIQLVQTYNQLFEENPINASGVDAKAILSARLSKSRRLENLIAQLPGEKKNGLFGNLIALSLGLTPNFKSNFDLAEDAKLQLSKDTYDDDLDNLLAQIGDQYADLFLAAKNLSDAILLSDILRVNTEITKAPLSASMIKRYDEHHQDLTLLKALVRQQLPEKYKEIFFDQSKNGYAGYIDGGASQEEFYKFIKPILEKMDGTEELLVKLNREDLLRKQRTFDNGSIPHQIHLGELHAILRRQEDFYPFLKDNREKIEKILTFRIPYYVGPLARGNSRFAWMTRKSEETITPWNFEEVVDKGASAQSFIERMTNFDKNLPNEKVLPKHSLLYEYFTVYNELTKVKYVTEGMRKPAFLSGEQKKAIVDLLFKTNRKVTVKQLKEDYFKKIECFDSVEISGVEDRFNASLGTYHDLLKIIKDKDFLDNEENEDILEDIVLTLTLFEDREMIEERLKTYAHLFDDKVMKQLKRRRYTGWGRLSRKLINGIRDKQSGKTILDFLKSDGFANRNFMQLIHDDSLTFKEDIQKAQVSGQGDSLHEHIANLAGSPAIKKGILQTVKVVDELVKVMGRHKPENIVIEMARENQTTQKGQKNSRERMKRIEEGIKELGSEVEFSHEYWMRHALTLAKRARDEREVPVGAVLVLNNRVIGEGWNRAIGLHDPTAHAEIMALRQGGLVMQNYRLIDATLYVTFEPCVMCAGAMIHSRIGRVVFGVRNAKTGAAGSLMDVLHYPGMNHRVEITEGILADECAALLCYFFRMPRQVFNAQKKAQSSTDEEVVKKMKNYWRQLLNAKLITQRKFDNLTKAERGGLSELDKAGFIKRQLVETRQITKHVAQILDSRMNTKYDENDKLIREVKVITLKSKLVSDFRKDFQFYKVREINNYHHAHDAYLNAVVGTALIKKYPKLESEFVYGDYKVYDVRKMIAKSEQEIGKATAKYFFYSNIMNFFKTEITLANGEIRKRPLIETNGETGEIVWDKGRDFATVRKVLSMPQVNIVKKTEVQTGGFSKESILPKRNSDKLIARKKDWDPKKYGGFDSPTVAYSVLVVAKVEKGKSKKLKSVKELLGITIMERSSFEKNPIDFLEAKGYKEVKKDLIIKLPKYSLFELENGRKRMLASAGELQKGNELALPSKYVNFLYLASHYEKLKGSPEDNEQKQLFVEQHKHYLDEIIEQISEFSKRVILADANLDKVLSAYNKHRDKPIREQAENIIHLFTLTNLGAPAAFKYFDTTIDRKRYTSTKEVLDATLIHQSITGLYETRIDLSQLGGD

SEQ ID NO: 301 - protein, 1420 aa, Artificial Sequence
  Description of artificial sequence: 125 Cas9 delta 792-906 TadAins polypeptide sequence
MDKKYSIGLAIGTNSVGWAVITDEYKVPSKKFKVLGNTDRHSIKKNLIGALLFDSGETAEATRLKRTARRRYTRRKNRICYLQEIFSNEMAKVDDSFFHRLEESFLVEEDKKHERHPIFGNIVDEVAYHEKYPTIYHLRKKLVDSTDKADLRLIYLALAHMIKFRGHFLIEGDLNPDNSDVDKLFIQLVQTYNQLFEENPINASGVDAKAILSARLSKSRRLENLIAQLPGEKKNGLFGNLIALSLGLTPNFKSNFDLAEDAKLQLSKDTYDDDLDNLLAQIGDQYADLFLAAKNLSDAILLSDILRVNTEITKAPLSASMIKRYDEHHQDLTLLKALVRQQLPEKYKEIFFDQSKNGYAGYIDGGASQEEFYKFIKPILEKMDGTEELLVKLNREDLLRKQRTFDNGSIPHQIHLGELHAILRRQEDFYPFLKDNREKIEKILTFRIPYYVGPLARGNSRFAWMTRKSEETITPWNFEEVVDKGASAQSFIERMTNFDKNLPNEKVLPKHSLLYEYFTVYNELTKVKYVTEGMRKPAFLSGEQKKAIVDLLFKTNRKVTVKQLKEDYFKKIECFDSVEISGVEDRFNASLGTYHDLLKIIKDKDFLDNEENEDILEDIVLTLTLFEDREMIEERLKTYAHLFDDKVMKQLKRRRYTGWGRLSRKLINGIRDKQSGKTILDFLKSDGFANRNFMQLIHDDSLTFKEDIQKAQVSGQGDSLHEHIANLAGSPAIKKGILQTVKVVDELVKVMGRHKPENIVIEMARENQTTQKGQKNSRERMKRIEEGIKELGSEVEFSHEYWMRHALTLAKRARDEREVPVGAVLVLNNRVIGEGWNRAIGLHDPTAHAEIMALRQGGLVMQNYRLIDATLYVTFEPCVMCAGAMIHSRIGRVVFGVRNAKTGAAGSLMDVLHYPGMNHRVEITEGILADECAALLCYFFRMPRQVFNAQKKAQSSTDGLSELDKAGFIKRQLVETRQITKHVAQILDSRMNTKYDENDKLIREVKVITLKSKLVSDFRKDFQFYKVREINNYHHAHDAYLNAVVGTALIKKYPKLESEFVYGDYKVYDVRKMIAKSEQEIGKATAKYFFYSNIMNFFKTEITLANGEIRKRPLIETNGETGEIVWDKGRDFATVRKVLSMPQVNIVKKTEVQTGGFSKESILPKRNSDKLIARKKDWDPKKYGGFDSPTVAYSVLVVAKVEKGKSKKLKSVKELLGITIMERSSFEKNPIDFLEAKGYKEVKKDLIIKLPKYSLFELENGRKRMLASAGELQKGNELALPSKYVNFLYLASHYEKLKGSPEDNEQKQLFVEQHKHYLDEIIEQISEFSKRVILADANLDKVLSAYNKHRDKPIREQAENIIHLFTLTNLGAPAAFKYFDTTIDRKRYTSTKEVLDATLIHQSITGLYETRIDLSQLGGD

SEQ ID NO: 302 - protein, 1554 aa, Artificial Sequence
  Description of artificial sequence: 126 TadA CP65ins 1003 polypeptide sequence
MDKKYSIGLAIGTNSVGWAVITDEYKVPSKKFKVLGNTDRHSIKKNLIGALLFDSGETAEATRLKRTARRRYTRRKNRICYLQEIFSNEMAKVDDSFFHRLEESFLVEEDKKHERHPIFGNIVDEVAYHEKYPTIYHLRKKLVDSTDKADLRLIYLALAHMIKFRGHFLIEGDLNPDNSDVDKLFIQLVQTYNQLFEENPINASGVDAKAILSARLSKSRRLENLIAQLPGEKKNGLFGNLIALSLGLTPNFKSNFDLAEDAKLQLSKDTYDDDLDNLLAQIGDQYADLFLAAKNLSDAILLSDILRVNTEITKAPLSASMIKRYDEHHQDLTLLKALVRQQLPEKYKEIFFDQSKNGYAGYIDGGASQEEFYKFIKPILEKMDGTEELLVKLNREDLLRKQRTFDNGSIPHQIHLGELHAILRRQEDFYPFLKDNREKIEKILTFRIPYYVGPLARGNSRFAWMTRKSEETITPWNFEEVVDKGASAQSFIERMTNFDKNLPNEKVLPKHSLLYEYFTVYNELTKVKYVTEGMRKPAFLSGEQKKAIVDLLFKTNRKVTVKQLKEDYFKKIECFDSVEISGVEDRFNASLGTYHDLLKIIKDKDFLDNEENEDILEDIVLTLTLFEDREMIEERLKTYAHLFDDKVMKQLKRRRYTGWGRLSRKLINGIRDKQSGKTILDFLKSDGFANRNFMQLIHDDSLTFKEDIQKAQVSGQGDSLHEHIANLAGSPAIKKGILQTVKVVDELVKVMGRHKPENIVIEMARENQTTQKGQKNSRERMKRIEEGIKELGSQILKEHPVENTQLQNEKLYLYYLQNGRDMYVDQELDINRLSDYDVDHIVPQSFLKDDSIDNKVLTRSDKNRGKSDNVPSEEVVKKMKNYWRQLLNAKLITQRKFDNLTKAERGGLSELDKAGFIKRQLVETRQITKHVAQILDSRMNTKYDENDKLIREVKVITLKSKLVSDFRKDFQFYKVREINNYHHAHDAYLNAVVGTALIKKYPKTAHAEIMALRQGGLVMQNYRLIDATLYVTFEPCVMCAGAMIHSRIGRVVFGVRNAKTGAAGSLMDVLHYPGMNHRVEITEGILADECAALLCYFFRMPRQVFNAQKKAQSSTDGSSGSETPGTSESATPESSGSEVEFSHEYWMRHALTLAKRARDEREVPVGAVLVLNNRVIGEGWNRAIGLHDPLESEFVYGDYKVYDVRKMIAKSEQEIGKATAKYFFYSNIMNFFKTEITLANGEIRKRPLIETNGETGEIVWDKGRDFATVRKVLSMPQVNIVKKTEVQTGGFSKESILPKRNSDKLIARKKDWDPKKYGGFDSPTVAYSVLVVAKVEKGKSKKLKSVKELLGITIMERSSFEKNPIDFLEAKGYKEVKKDLIIKLPKYSLFELENGRKRMLASAGELQKGNELALPSKYVNFLYLASHYEKLKGSPEDNEQKQLFVEQHKHYLDEIIEQISEFSKRVILADANLDKVLSAYNKHRDKPIREQAENIIHLFTLTNLGAPAAFKYFDTTIDRKRYTSTKEVLDATLIHQSITGLYETRIDLSQLGGD

SEQ ID NO: 303 - protein, 1554 aa, Artificial Sequence
  Description of artificial sequence: 127 TadA CP65ins 1016 polypeptide sequence
MDKKYSIGLAIGTNSVGWAVITDEYKVPSKKFKVLGNTDRHSIKKNLIGALLFDSGETAEATRLKRTARRRYTRRKNRICYLQEIFSNEMAKVDDSFFHRLEESFLVEEDKKHERHPIFGNIVDEVAYHEKYPTIYHLRKKLVDSTDKADLRLIYLALAHMIKFRGHFLIEGDLNPDNSDVDKLFIQLVQTYNQLFEENPINASGVDAKAILSARLSKSRRLENLIAQLPGEKKNGLFGNLIALSLGLTPNFKSNFDLAEDAKLQLSKDTYDDDLDNLLAQIGDQYADLFLAAKNLSDAILLSDILRVNTEITKAPLSASMIKRYDEHHQDLTLLKALVRQQLPEKYKEIFFDQSKNGYAGYIDGGASQEEFYKFIKPILEKMDGTEELLVKLNREDLLRKQRTFDNGSIPHQIHLGELHAILRRQEDFYPFLKDNREKIEKILTFRIPYYVGPLARGNSRFAWMTRKSEETITPWNFEEVVDKGASAQSFIERMTNFDKNLPNEKVLPKHSLLYEYFTVYNELTKVKYVTEGMRKPAFLSGEQKKAIVDLLFKTNRKVTVKQLKEDYFKKIECFDSVEISGVEDRFNASLGTYHDLLKIIKDKDFLDNEENEDILEDIVLTLTLFEDREMIEERLKTYAHLFDDKVMKQLKRRRYTGWGRLSRKLINGIRDKQSGKTILDFLKSDGFANRNFMQLIHDDSLTFKEDIQKAQVSGQGDSLHEHIANLAGSPAIKKGILQTVKVVDELVKVMGRHKPENIVIEMARENQTTQKGQKNSRERMKRIEEGIKELGSQILKEHPVENTQLQNEKLYLYYLQNGRDMYVDQELDINRLSDYDVDHIVPQSFLKDDSIDNKVLTRSDKNRGKSDNVPSEEVVKKMKNYWRQLLNAKLITQRKFDNLTKAERGGLSELDKAGFIKRQLVETRQITKHVAQILDSRMNTKYDENDKLIREVKVITLKSKLVSDFRKDFQFYKVREINNYHHAHDAYLNAVVGTALIKKYPKLESEFVYGDYKVTAHAEIMALRQGGLVMQNYRLIDATLYVTFEPCVMCAGAMIHSRIGRVVFGVRNAKTGAAGSLMDVLHYPGMNHRVEITEGILADECAALLCYFFRMPRQVFNAQKKAQSSTDGSSGSETPGTSESATPESSGSEVEFSHEYWMRHALTLAKRARDEREVPVGAVLVLNNRVIGEGWNRAIGLHDPYDVRKMIAKSEQEIGKATAKYFFYSNIMNFFKTEITLANGEIRKRPLIETNGETGEIVWDKGRDFATVRKVLSMPQVNIVKKTEVQTGGFSKESILPKRNSDKLIARKKDWDPKKYGGFDSPTVAYSVLVVAKVEKGKSKKLKSVKELLGITIMERSSFEKNPIDFLEAKGYKEVKKDLIIKLPKYSLFELENGRKRMLASAGELQKGNELALPSKYVNFLYLASHYEKLKGSPEDNEQKQLFVEQHKHYLDEIIEQISEFSKRVILADANLDKVLSAYNKHRDKPIREQAENIIHLFTLTNLGAPAAFKYFDTTIDRKRYTSTKEVLDATLIHQSITGLYETRIDLSQLGGD

SEQ ID NO: 304 - protein, 1554 aa, Artificial Sequence
  Description of artificial sequence: 128 TadA CP65ins 1022 polypeptide sequence
MDKKYSIGLAIGTNSVGWAVITDEYKVPSKKFKVLGNTDRHSIKKNLIGALLFDSGETAEATRLKRTARRRYTRRKNRICYLQEIFSNEMAKVDDSFFHRLEESFLVEEDKKHERHPIFGNIVDEVAYHEKYPTIYHLRKKLVDSTDKADLRLIYLALAHMIKFRGHFLIEGDLNPDNSDVDKLFIQLVQTYNQLFEENPINASGVDAKAILSARLSKSRRLENLIAQLPGEKKNGLFGNLIALSLGLTPNFKSNFDLAEDAKLQLSKDTYDDDLDNLLAQIGDQYADLFLAAKNLSDAILLSDILRVNTEITKAPLSASMIKRYDEHHQDLTLLKALVRQQLPEKYKEIFFDQSKNGYAGYIDGGASQEEFYKFIKPILEKMDGTEELLVKLNREDLLRKQRTFDNGSIPHQIHLGELHAILRRQEDFYPFLKDNREKIEKILTFRIPYYVGPLARGNSRFAWMTRKSEETITPWNFEEVVDKGASAQSFIERMTNFDKNLPNEKVLPKHSLLYEYFTVYNELTKVKYVTEGMRKPAFLSGEQKKAIVDLLFKTNRKVTVKQLKEDYFKKIECFDSVEISGVEDRFNASLGTYHDLLKIIKDKDFLDNEENEDILEDIVLTLTLFEDREMIEERLKTYAHLFDDKVMKQLKRRRYTGWGRLSRKLINGIRDKQSGKTILDFLKSDGFANRNFMQLIHDDSLTFKEDIQKAQVSGQGDSLHEHIANLAGSPAIKKGILQTVKVVDELVKVMGRHKPENIVIEMARENQTTQKGQKNSRERMKRIEEGIKELGSQILKEHPVENTQLQNEKLYLYYLQNGRDMYVDQELDINRLSDYDVDHIVPQSFLKDDSIDNKVLTRSDKNRGKSDNVPSEEVVKKMKNYWRQLLNAKLITQRKFDNLTKAERGGLSELDKAGFIKRQLVETRQITKHVAQILDSRMNTKYDENDKLIREVKVITLKSKLVSDFRKDFQFYKVREINNYHHAHDAYLNAVVGTALIKKYPKLESEFVYGDYKVYDVRKMITAHAEIMALRQGGLVMQNYRLIDATLYVTFEPCVMCAGAMIHSRIGRVVFGVRNAKTGAAGSLMDVLHYPGMNHRVEITEGILADECAALLCYFFRMPRQVFNAQKKAQSSTDGSSGSETPGTSESATPESSGSEVEFSHEYWMRHALTLAKRARDEREVPVGAVLVLNNRVIGEGWNRAIGLHDPAKSEQEIGKATAKYFFYSNIMNFFKTEITLANGEIRKRPLIETNGETGEIVWDKGRDFATVRKVLSMPQVNIVKKTEVQTGGFSKESILPKRNSDKLIARKKDWDPKKYGGFDSPTVAYSVLVVAKVEKGKSKKLKSVKELLGITIMERSSFEKNPIDFLEAKGYKEVKKDLIIKLPKYSLFELENGRKRMLASAGELQKGNELALPSKYVNFLYLASHYEKLKGSPEDNEQKQLFVEQHKHYLDEIIEQISEFSKRVILADANLDKVLSAYNKHRDKPIREQAENIIHLFTLTNLGAPAAFKYFDTTIDRKRYTSTKEVLDATLIHQSITGLYETRIDLSQLGGD

SEQ ID NO: 305 - protein, 1554 aa, Artificial Sequence
  Description of artificial sequence: 129 TadA CP65ins 1029 polypeptide sequence
MDKKYSIGLAIGTNSVGWAVITDEYKVPSKKFKVLGNTDRHSIKKNLIGALLFDSGETAEATRLKRTARRRYTRRKNRICYLQEIFSNEMAKVDDSFFHRLEESFLVEEDKKHERHPIFGNIVDEVAYHEKYPTIYHLRKKLVDSTDKADLRLIYLALAHMIKFRGHFLIEGDLNPDNSDVDKLFIQLVQTYNQLFEENPINASGVDAKAILSARLSKSRRLENLIAQLPGEKKNGLFGNLIALSLGLTPNFKSNFDLAEDAKLQLSKDTYDDDLDNLLAQIGDQYADLFLAAKNLSDAILLSDILRVNTEITKAPLSASMIKRYDEHHQDLTLLKALVRQQLPEKYKEIFFDQSKNGYAGYIDGGASQEEFYKFIKPILEKMDGTEELLVKLNREDLLRKQRTFDNGSIPHQIHLGELHAILRRQEDFYPFLKDNREKIEKILTFRIPYYVGPLARGNSRFAWMTRKSEETITPWNFEEVVDKGASAQSFIERMTNFDKNLPNEKVLPKHSLLYEYFTVYNELTKVKYVTEGMRKPAFLSGEQKKAIVDLLFKTNRKVTVKQLKEDYFKKIECFDSVEISGVEDRFNASLGTYHDLLKIIKDKDFLDNEENEDILEDIVLTLTLFEDREMIEERLKTYAHLFDDKVMKQLKRRRYTGWGRLSRKLINGIRDKQSGKTILDFLKSDGFANRNFMQLIHDDSLTFKEDIQKAQVSGQGDSLHEHIANLAGSPAIKKGILQTVKVVDELVKVMGRHKPENIVIEMARENQTTQKGQKNSRERMKRIEEGIKELGSQILKEHPVENTQLQNEKLYLYYLQNGRDMYVDQELDINRLSDYDVDHIVPQSFLKDDSIDNKVLTRSDKNRGKSDNVPSEEVVKKMKNYWRQLLNAKLITQRKFDNLTKAERGGLSELDKAGFIKRQLVETRQITKHVAQILDSRMNTKYDENDKLIREVKVITLKSKLVSDFRKDFQFYKVREINNYHHAHDAYLNAVVGTALIKKYPKLESEFVYGDYKVYDVRKMIAKSEQEITAHAEIMALRQGGLVMQNYRLIDATLYVTFEPCVMCAGAMIHSRIGRVVFGVRNAKTGAAGSLMDVLHYPGMNHRVEITEGILADECAALLCYFFRMPRQVFNAQKKAQSSTDGSSGSETPGTSESATPESSGSEVEFSHEYWMRHALTLAKRARDEREVPVGAVLVLNNRVIGEGWNRAIGLHDPGKATAKYFFYSNIMNFFKTEITLANGEIRKRPLIETNGETGEIVWDKGRDFATVRKVLSMPQVNIVKKTEVQTGGFSKESILPKRNSDKLIARKKDWDPKKYGGFDSPTVAYSVLVVAKVEKGKSKKLKSVKELLGITIMERSSFEKNPIDFLEAKGYKEVKKDLIIKLPKYSLFELENGRKRMLASAGELQKGNELALPSKYVNFLYLASHYEKLKGSPEDNEQKQLFVEQHKHYLDEIIEQISEFSKRVILADANLDKVLSAYNKHRDKPIREQAENIIHLFTLTNLGAPAAFKYFDTTIDRKRYTSTKEVLDATLIHQSITGLYETRIDLSQLGGD

SEQ ID NO: 306 - protein, 1554 aa, Artificial Sequence
  Description of artificial sequence: 130 TadA CP65ins 1041 polypeptide sequence
MDKKYSIGLAIGTNSVGWAVITDEYKVPSKKFKVLGNTDRHSIKKNLIGALLFDSGETAEATRLKRTARRRYTRRKNRICYLQEIFSNEMAKVDDSFFHRLEESFLVEEDKKHERHPIFGNIVDEVAYHEKYPTIYHLRKKLVDSTDKADLRLIYLALAHMIKFRGHFLIEGDLNPDNSDVDKLFIQLVQTYNQLFEENPINASGVDAKAILSARLSKSRRLENLIAQLPGEKKNGLFGNLIALSLGLTPNFKSNFDLAEDAKLQLSKDTYDDDLDNLLAQIGDQYADLFLAAKNLSDAILLSDILRVNTEITKAPLSASMIKRYDEHHQDLTLLKALVRQQLPEKYKEIFFDQSKNGYAGYIDGGASQEEFYKFIKPILEKMDGTEELLVKLNREDLLRKQRTFDNGSIPHQIHLGELHAILRRQEDFYPFLKDNREKIEKILTFRIPYYVGPLARGNSRFAWMTRKSEETITPWNFEEVVDKGASAQSFIERMTNFDKNLPNEKVLPKHSLLYEYFTVYNELTKVKYVTEGMRKPAFLSGEQKKAIVDLLFKTNRKVTVKQLKEDYFKKIECFDSVEISGVEDRFNASLGTYHDLLKIIKDKDFLDNEENEDILEDIVLTLTLFEDREMIEERLKTYAHLFDDKVMKQLKRRRYTGWGRLSRKLINGIRDKQSGKTILDFLKSDGFANRNFMQLIHDDSLTFKEDIQKAQVSGQGDSLHEHIANLAGSPAIKKGILQTVKVVDELVKVMGRHKPENIVIEMARENQTTQKGQKNSRERMKRIEEGIKELGSQILKEHPVENTQLQNEKLYLYYLQNGRDMYVDQELDINRLSDYDVDHIVPQSFLKDDSIDNKVLTRSDKNRGKSDNVPSEEVVKKMKNYWRQLLNAKLITQRKFDNLTKAERGGLSELDKAGFIKRQLVETRQITKHVAQILDSRMNTKYDENDKLIREVKVITLKSKLVSDFRKDFQFYKVREINNYHHAHDAYLNAVVGTALIKKYPKLESEFVYGDYKVYDVRKMIAKSEQEIGKATAKYFFYSTAHAEIMALRQGGLVMQNYRLIDATLYVTFEPCVMCAGAMIHSRIGRVVFGVRNAKTGAAGSLMDVLHYPGMNHRVEITEGILADECAALLCYFFRMPRQVFNAQKKAQSSTDGSSGSETPGTSESATPESSGSEVEFSHEYWMRHALTLAKRARDEREVPVGAVLVLNNRVIGEGWNRAIGLHDPNIMNFFKTEITLANGEIRKRPLIETNGETGEIVWDKGRDFATVRKVLSMPQVNIVKKTEVQTGGFSKESILPKRNSDKLIARKKDWDPKKYGGFDSPTVAYSVLVVAKVEKGKSKKLKSVKELLGITIMERSSFEKNPIDFLEAKGYKEVKKDLIIKLPKYSLFELENGRKRMLASAGELQKGNELALPSKYVNFLYLASHYEKLKGSPEDNEQKQLFVEQHKHYLDEIIEQISEFSKRVILADANLDKVLSAYNKHRDKPIREQAENIIHLFTLTNLGAPAAFKYFDTTIDRKRYTSTKEVLDATLIHQSITGLYETRIDLSQLGGD

SEQ ID NO: 307 - protein, 1554 aa, Artificial Sequence
  Description of artificial sequence: 131 TadA CP65ins 1054 polypeptide sequence
MDKKYSIGLAIGTNSVGWAVITDEYKVPSKKFKVLGNTDRHSIKKNLIGALLFDSGETAEATRLKRTARRRYTRRKNRICYLQEIFSNEMAKVDDSFFHRLEESFLVEEDKKHERHPIFGNIVDEVAYHEKYPTIYHLRKKLVDSTDKADLRLIYLALAHMIKFRGHFLIEGDLNPDNSDVDKLFIQLVQTYNQLFEENPINASGVDAKAILSARLSKSRRLENLIAQLPGEKKNGLFGNLIALSLGLTPNFKSNFDLAEDAKLQLSKDTYDDDLDNLLAQIGDQYADLFLAAKNLSDAILLSDILRVNTEITKAPLSASMIKRYDEHHQDLTLLKALVRQQLPEKYKEIFFDQSKNGYAGYIDGGASQEEFYKFIKPILEKMDGTEELLVKLNREDLLRKQRTFDNGSIPHQIHLGELHAILRRQEDFYPFLKDNREKIEKILTFRIPYYVGPLARGNSRFAWMTRKSEETITPWNFEEVVDKGASAQSFIERMTNFDKNLPNEKVLPKHSLLYEYFTVYNELTKVKYVTEGMRKPAFLSGEQKKAIVDLLFKTNRKVTVKQLKEDYFKKIECFDSVEISGVEDRFNASLGTYHDLLKIIKDKDFLDNEENEDILEDIVLTLTLFEDREMIEERLKTYAHLFDDKVMKQLKRRRYTGWGRLSRKLINGIRDKQSGKTILDFLKSDGFANRNFMQLIHDDSLTFKEDIQKAQVSGQGDSLHEHIANLAGSPAIKKGILQTVKVVDELVKVMGRHKPENIVIEMARENQTTQKGQKNSRERMKRIEEGIKELGSQILKEHPVENTQLQNEKLYLYYLQNGRDMYVDQELDINRLSDYDVDHIVPQSFLKDDSIDNKVLTRSDKNRGKSDNVPSEEVVKKMKNYWRQLLNAKLITQRKFDNLTKAERGGLSELDKAGFIKRQLVETRQITKHVAQILDSRMNTKYDENDKLIREVKVITLKSKLVSDFRKDFQFYKVREINNYHHAHDAYLNAVVGTALIKKYPKLESEFVYGDYKVYDVRKMIAKSEQEIGKATAKYFFYSNIMNFFKTEITLANTAHAEIMALRQGGLVMQNYRLIDATLYVTFEPCVMCAGAMIHSRIGRVVFGVRNAKTGAAGSLMDVLHYPGMNHRVEITEGILADECAALLCYFFRMPRQVFNAQKKAQSSTDGSSGSETPGTSESATPESSGSEVEFSHEYWMRHALTLAKRARDEREVPVGAVLVLNNRVIGEGWNRAIGLHDPGEIRKRPLIETNGETGEIVWDKGRDFATVRKVLSMPQVNIVKKTEVQTGGFSKESILPKRNSDKLIARKKDWDPKKYGGFDSPTVAYSVLVVAKVEKGKSKKLKSVKELLGITIMERSSFEKNPIDFLEAKGYKEVKKDLIIKLPKYSLFELENGRKRMLASAGELQKGNELALPSKYVNFLYLASHYEKLKGSPEDNEQKQLFVEQHKHYLDEIIEQISEFSKRVILADANLDKVLSAYNKHRDKPIREQAENIIHLFTLTNLGAPAAFKYFDTTIDRKRYTSTKEVLDATLIHQSITGLYETRIDLSQLGGD

SEQ ID NO: 308 - protein, 1554 aa, Artificial Sequence
  Description of artificial sequence: 132 TadA CP65ins 1246 polypeptide sequence
MDKKYSIGLAIGTNSVGWAVITDEYKVPSKKFKVLGNTDRHSIKKNLIGALLFDSGETAEATRLKRTARRRYTRRKNRICYLQEIFSNEMAKVDDSFFHRLEESFLVEEDKKHERHPIFGNIVDEVAYHEKYPTIYHLRKKLVDSTDKADLRLIYLALAHMIKFRGHFLIEGDLNPDNSDVDKLFIQLVQTYNQLFEENPINASGVDAKAILSARLSKSRRLENLIAQLPGEKKNGLFGNLIALSLGLTPNFKSNFDLAEDAKLQLSKDTYDDDLDNLLAQIGDQYADLFLAAKNLSDAILLSDILRVNTEITKAPLSASMIKRYDEHHQDLTLLKALVRQQLPEKYKEIFFDQSKNGYAGYIDGGASQEEFYKFIKPILEKMDGTEELLVKLNREDLLRKQRTFDNGSIPHQIHLGELHAILRRQEDFYPFLKDNREKIEKILTFRIPYYVGPLARGNSRFAWMTRKSEETITPWNFEEVVDKGASAQSFIERMTNFDKNLPNEKVLPKHSLLYEYFTVYNELTKVKYVTEGMRKPAFLSGEQKKAIVDLLFKTNRKVTVKQLKEDYFKKIECFDSVEISGVEDRFNASLGTYHDLLKIIKDKDFLDNEENEDILEDIVLTLTLFEDREMIEERLKTYAHLFDDKVMKQLKRRRYTGWGRLSRKLINGIRDKQSGKTILDFLKSDGFANRNFMQLIHDDSLTFKEDIQKAQVSGQGDSLHEHIANLAGSPAIKKGILQTVKVVDELVKVMGRHKPENIVIEMARENQTTQKGQKNSRERMKRIEEGIKELGSQILKEHPVENTQLQNEKLYLYYLQNGRDMYVDQELDINRLSDYDVDHIVPQSFLKDDSIDNKVLTRSDKNRGKSDNVPSEEVVKKMKNYWRQLLNAKLITQRKFDNLTKAERGGLSELDKAGFIKRQLVETRQITKHVAQILDSRMNTKYDENDKLIREVKVITLKSKLVSDFRKDFQFYKVREINNYHHAHDAYLNAVVGTALIKKYPKLESEFVYGDYKVYDVRKMIAKSEQEIGKATAKYFFYSNIMNFFKTEITLANGEIRKRPLIETNGETGEIVWDKGRDFATVRKVLSMPQVNIVKKTEVQTGGFSKESILPKRNSDKLIARKKDWDPKKYGGFDSPTVAYSVLVVAKVEKGKSKKLKSVKELLGITIMERSSFEKNPIDFLEAKGYKEVKKDLIIKLPKYSLFELENGRKRMLASAGELQKGNELALPSKYVNFLYLASHYEKLKGTAHAEIMALRQGGLVMQNYRLIDATLYVTFEPCVMCAGAMIHSRIGRVVFGVRNAKTGAAGSLMDVLHYPGMNHRVEITEGILADECAALLCYFFRMPRQVFNAQKKAQSSTDGSSGSETPGTSESATPESSGSEVEFSHEYWMRHALTLAKRARDEREVPVGAVLVLNNRVIGEGWNRAIGLHDPSPEDNEQKQLFVEQHKHYLDEIIEQISEFSKRVILADANLDKVLSAYNKHRDKPIREQAENIIHLFTLTNLGAPAAFKYFDTTIDRKRYTSTKEVLDATLIHQSITGLYETRIDLSQLGGD

SEQ ID NO: 309 - protein, 160 aa, Staphylococcus aureus
  MISC_FEATURE (1)..(160): TadA polypeptide sequence
MGSHMTNDIYFMTLAIEEAKKAAQLGEVPIGAIITKDDEVIARAHNLRETLQQPTAHAEHIAIERAAKVLGSWRLEGCTLYVTLEPCVMCAGTIVMSRIPRVVYGADDPKGGCSGSLMNLLQQSNFNHRAIVDKGVLKEACSTLLTTFFKNLRANKKSTN

SEQ ID NO: 310 - protein, 161 aa, Bacillus subtilis
  MISC_FEATURE (1)..(161): TadA polypeptide sequence
MTQDELYMKEAIKEAKKAEEKGEVPIGAVLVINGEIIARAHNLRETEQRSIAHAEMLVIDEACKALGTWRLEGATLYVTLEPCPMCAGAVVLSRVEKVVFGAFDPKGGCSGTLMNLLQEERFNHQAEVVSGVLEEECGGMLSAFFRELRKKKKAARKNLSE

SEQ ID NO: 311 - protein, 183 aa, Salmonella typhimurium
  MISC_FEATURE (1)..(183): TadA polypeptide sequence
MPPAFITGVTSLSDVELDHEYWMRHALTLAKRAWDEREVPVGAVLVHNHRVIGEGWNRPIGRHDPTAHAEIMALRQGGLVLQNYRLLDTTLYVTLEPCVMCAGAMVHSRIGRVVFGARDAKTGAAGSLIDVLHHPGMNHRVEIIEGVLRDECATLLSDFFRMRRQEIKALKKADRAEGAGPAV

SEQ ID NO: 312 - protein, 164 aa, Shewanella putrefaciens
  MISC_FEATURE (1)..(164): TadA polypeptide sequence
MDEYWMQVAMQMAEKAEAAGEVPVGAVLVKDGQQIATGYNLSISQHDPTAHAEILCLRSAGKKLENYRLLDATLYITLEPCAMCAGAMVHSRIARVVYGARDEKTGAAGTVVNLLQHPAFNHQVEVTSGVLAEACSAQLSRFFKRRRDEKKALKLAQRAQQGIE

SEQ ID NO: 313 - protein, 173 aa, Haemophilus influenzae
  MISC_FEATURE (1)..(173): TadA polypeptide sequence
MDAAKVRSEFDEKMMRYALELADKAEALGEIPVGAVLVDDARNIIGEGWNLSIVQSDPTAHAEIIALRNGAKNIQNYRLLNSTLYVTLEPCTMCAGAILHSRIKRLVFGASDYKTGAIGSRFHFFDDYKMNHTLEITSGVLAEECSQKLSTFFQKRREEKKIEKALLKSLSDK

SEQ ID NO: 314 - protein, 161 aa, Caulobacter crescentus
  MISC_FEATURE (1)..(161): TadA polypeptide sequence
MRTDESEDQDHRMMRLALDAARAAAEAGETPVGAVILDPSTGEVIATAGNGPIAAHDPTAHAEIAAMRAAAAKLGNYRLTDLTLVVTLEPCAMCAGAISHARIGRVVFGADDPKGGAVVHGPKFFAQPTCHWRPEVTGGVLADESADLLRGFFRARRKAKI

SEQ ID NO: 315 - protein, 179 aa, Geobacter sulfurreducens
  MISC_FEATURE (1)..(179): TadA polypeptide sequence
MSSLKKTPIRDDAYWMGKAIREAAKAAARDEVPIGAVIVRDGAVIGRGHNLREGSNDPSAHAEMIAIRQAARRSANWRLTGATLYVTLEPCLMCMGAIILARLERVVFGCYDPKGGAAGSLYDLSADPRLNHQVRLSPGVCQEECGTMLSDFFRDLRRRKKAKATPALFIDERKVPPEP

SEQ ID NO: 316 - protein, 167 aa, Artificial Sequence
  Description of artificial sequence: TadA*8 polypeptide sequence
MSEVEFSHEYWMRHALTLAKRARDEREVPVGAVLVLNNRVIGEGWNRAIGLHDPTAHAEIMALRQGGLVMQNYRLIDATLYVTFEPCVMCAGAMIHSRIGRVVFGVRNAKTGAAGSLMDVLHYPGMNHRVEITEGILADECAALLCTFFRMPRQVFNAQKKAQSSTD

SEQ ID NO: 317 - RNA, 80 nt, Artificial Sequence
  Description of artificial sequence: gRNA scaffold polynucleotide sequence
guuuuagagcuagaaauagcaaguuaaaauaaggcuaguccguuaucaacuugaaaaaguggcaccgagucggugcuuuu

SEQ ID NO: 318 - RNA, 125 nt, Artificial Sequence
  Description of artificial sequence: gRNA scaffold polynucleotide sequence
guuuuuguacucucaagauuuaaguaacuguacaacgaaacuuacacaguuacuuaaaucuugcagaagcuacaaagauaaggcuucaugccgaaaucaacacccugucauuuuauggcagggug

SEQ ID NO: 319 - RNA, 76 nt, S. pyogenes
  misc_feature (1)..(76): S. pyogenes gRNA scaffold ologonucleotide sequence
guuuuagagcuagaaauagcaaguuaaaauaaggcuaguccguuaucaacuugaaaaaguggcaccgagucggugc

SEQ ID NO: 320 - RNA, 84 nt, S. aureus
  misc_feature (1)..(84): S. aureus gRNA scaffold oligonucleotide sequence
guuuuaguacucuguaaugaaaauuacagaaucuacuaaaacaaggcaaaaugccguguuuaucucgucaacuuguuggcgaga

SEQ ID NO: 321 - RNA, 97 nt, Bacillus hisashii
  misc_feature (1)..(97): BhCas12b gRNA scaffold oligonucleotide sequence
guucugucuuuuggucaggacaaccgucuagcuauaagugcugcagggugugagaaacuccuauugcuggacgaugucucuuacgaggcauuagcac

SEQ ID NO: 322 - RNA, 88 nt, Bacillus sp.
  misc_feature (1)..(88): BvCas12b gRNA scaffold oligonucleotide sequence
gaccuauagggucaaugaaucugugcgugugccauaaguaauuaaaaauuacccaccacaggagcaccugaaaacaggugcuuggcac

SEQ ID NO: 323 - RNA, 80 nt, Artificial Sequence
  Description of artificial sequence: gRNA scaffold nucleotide sequence; oligonucleotide sequence
  modified_base (78)..(80): um
  misc_feature (78)..(80): In embodiments, a nucleotide(s) is linked to the preceding 5' nucleotide by a 3' phosphorothioate internucleotide liknage
guuuuagagcuagaaauagcaaguuaaaauaaggcuaguccguuaucaacuugaaaaagugggaccgagucggugcuuuu

SEQ ID NO: 324 - RNA, 80 nt, Artificial Sequence; identical to SEQ ID NO: 317
  Description of artificial sequence: gRNA scaffold nucleotide sequence
  misc_feature (78)..(80): In embodiments, a nucleotide(s) is linked to the preceding 5' nucleotide by a 3' phosphorothioate internucleotide liknage
  modified_base (78)..(80): um

SEQ ID NO: 325 - RNA, 117 nt, Bacillus hisashii
  misc_feature (1)..(117): BhCas12b gRNA scaffold + guide sequence; oligonucleotide sequence
  misc_feature (1)..(97): BhCas12b sgRNA scaffold
guucugucuuuuggucaggacaaccgucuagcuauaagugcugcagggugugagaaacuccuauugcuggacgaugucucuuacgaggcauuagcacnnnnnnnnnnnnnnnnnnnn

SEQ ID NO: 326 - RNA, 108 nt, Bacillus sp.
  misc_feature (1)..(108): BvCas12b gRNA scaffold + guide sequence; oligonucleotide sequence
  misc_feature (1)..(88): BvCas12b gRNA scaffold
gaccuauagggucaaugaaucugugcgugugccauaaguaauuaaaaauuacccaccacaggagcaccugaaaacaggugcuuggcacnnnnnnnnnnnnnnnnnnnn

SEQ ID NO: 327 - RNA, 119 nt, Alicyclobacillus acidiphilus
  misc_feature (1)..(119): AaCas12b gRNA scaffold + guide sequence; oligonucleotide sequence
  misc_feature (1)..(99): AaCas12b gRNA scaffold
gucuaaaggacagaauuuuucaacgggugugccaauggccacuuuccagguggcaaagcccguugaacuucucaaaaagaacgaucugagaaguggcacnnnnnnnnnnnnnnnnnnnn

SEQ ID NO: 328 - protein, 29 aa, Artificial Sequence
  Description of artificial sequence: synthetic polypeptide sequence
PKKKRKVEGADKRTADGSEFESPKKKRKV

SEQ ID NO: 329 - protein, 23 aa, Artificial Sequence
  Description of artificial sequence: synthetic peptide sequence
RKSGKIAAIVVKRPRKPKKKRKV

SEQ ID NO: 330 - protein, 8 aa, Artificial Sequence
  Description of artificial sequence: synthetic peptide sequence
SGGSSGGS

SEQ ID NO: 331 - protein, 1609 aa, Artificial Sequence
  Description of artificial sequence: pNMG-B335 ABE8.1_Y147T_CP5_NGC PAM_monomer polypeptide sequence
MSEVEFSHEYWMRHALTLAKRARDEREVPVGAVLVLNNRVIGEGWNRAIGLHDPTAHAEIMALRQGGLVMQNYRLIDATLYVTFEPCVMCAGAMIHSRIGRVVFGVRNAKTGAAGSLMDVLHYPGMNHRVEITEGILADECAALLCTFFRMPRQVFNAQKKAQSSTDSGGSSGGSSGSETPGTSESATPESSGGSSGGSEIGKATAKYFFYSNIMNFFKTEITLANGEIRKRPLIETNGETGEIVWDKGRDFATVRKVLSMPQVNIVKKTEVQTGGFSKESILPKRNSDKLIARKKDWDPKKYGGFMQPTVAYSVLVVAKVEKGKSKKLKSVKELLGITIMERSSFEKNPIDFLEAKGYKEVKKDLIIKLPKYSLFELENGRKRMLASAKFLQKGNELALPSKYVNFLYLASHYEKLKGSPEDNEQKQLFVEQHKHYLDEIIEQISEFSKRVILADANLDKVLSAYNKHRDKPIREQAENIIHLFTLTNLGAPRAFKYFDTTIARKEYRSTKEVLDATLIHQSITGLYETRIDLSQLGGDGGSGGSGGSGGSGGSGGSGGMDKKYSIGLAIGTNSVGWAVITDEYKVPSKKFKVLGNTDRHSIKKNLIGALLFDSGETAEATRLKRTARRRYTRRKNRICYLQEIFSNEMAKVDDSFFHRLEESFLVEEDKKHERHPIFGNIVDEVAYHEKYPTIYHLRKKLVDSTDKADLRLIYLALAHMIKFRGHFLIEGDLNPDNSDVDKLFIQLVQTYNQLFEENPINASGVDAKAILSARLSKSRRLENLIAQLPGEKKNGLFGNLIALSLGLTPNFKSNFDLAEDAKLQLSKDTYDDDLDNLLAQIGDQYADLFLAAKNLSDAILLSDILRVNTEITKAPLSASMIKRYDEHHQDLTLLKALVRQQLPEKYKEIFFDQSKNGYAGYIDGGASQEEFYKFIKPILEKMDGTEELLVKLNREDLLRKQRTFDNGSIPHQIHLGELHAILRRQEDFYPFLKDNREKIEKILTFRIPYYVGPLARGNSRFAWMTRKSEETITPWNFEEVVDKGASAQSFIERMTNFDKNLPNEKVLPKHSLLYEYFTVYNELTKVKYVTEGMRKPAFLSGEQKKAIVDLLFKTNRKVTVKQLKEDYFKKIECFDSVEISGVEDRFNASLGTYHDLLKIIKDKDFLDNEENEDILEDIVLTLTLFEDREMIEERLKTYAHLFDDKVMKQLKRRRYTGWGRLSRKLINGIRDKQSGKTILDFLKSDGFANRNFMQLIHDDSLTFKEDIQKAQVSGQGDSLHEHIANLAGSPAIKKGILQTVKVVDELVKVMGRHKPENIVIEMARENQTTQKGQKNSRERMKRIEEGIKELGSQILKEHPVENTQLQNEKLYLYYLQNGRDMYVDQELDINRLSDYDVDHIVPQSFLKDDSIDNKVLTRSDKNRGKSDNVPSEEVVKKMKNYWRQLLNAKLITQRKFDNLTKAERGGLSELDKAGFIKRQLVETRQITKHVAQILDSRMNTKYDENDKLIREVKVITLKSKLVSDFRKDFQFYKVREINNYHHAHDAYLNAVVGTALIKKYPKLESEFVYGDYKVYDVRKMIAKSEQEGADKRTADGSEFESPKKKRKV

SEQ ID NO: 332 - protein, 1807 aa, Artificial Sequence
  Description of artificial sequence: pNMG-357_ABE8.14 with NGC PAM CP5 polypeptide sequence
  MISC_FEATURE (1)..(174): Adenosine deaminase sequence
  MISC_FEATURE (175)..(198): Linker sequence
  MISC_FEATURE (199)..(365): Adenosine deaminase sequence
  MISC_FEATURE (366)..(397): Linker sequence
  MISC_FEATURE (398)..(738): Sequence derived from Cas9
  MISC_FEATURE (739)..(759): Linker sequence
  MISC_FEATURE (760)..(1785): Sequence derived from Cas9
  MISC_FEATURE (1786)..(1807): Bipartite nuclear localization sequence
MSEVEFSHEYWMRHALTLAKRAWDEREVPVGAVLVHNNRVIGEGWNRPIGRHDPTAHAEIMALRQGGLVMQNYRLIDATLYVTLEPCVMCAGAMIHSRIGRVVFGARDAKTGAAGSLMDVLHHPGMNHRVEITEGILADECAALLSDFFRMRRQEIKAQKKAQSSTDGGSSGGSSGSETPGTSESATPESSGGSSGGSMSEVEFSHEYWMRHALTLAKRARDEREVPVGAVLVLNNRVIGEGWNRAIGLHDPTAHAEIMALRQGGLVMQNYRLIDATLYVTFEPCVMCAGAMIHSRIGRVVFGVRNAKTGAAGSLMDVLHYPGMNHRVEITEGILADECAALLCTFFRMPRQVFNAQKKAQSSTDSGGSSGGSSGSETPGTSESATPESSGGSSGGSEIGKATAKYFFYSNIMNFFKTEITLANGEIRKRPLIETNGETGEIVWDKGRDFATVRKVLSMPQVNIVKKTEVQTGGFSKESILPKRNSDKLIARKKDWDPKKYGGFMQPTVAYSVLVVAKVEKGKSKKLKSVKELLGITIMERSSFEKNPIDFLEAKGYKEVKKDLIIKLPKYSLFELENGRKRMLASAKFLQKGNELALPSKYVNFLYLASHYEKLKGSPEDNEQKQLFVEQHKHYLDEIIEQISEFSKRVILADANLDKVLSAYNKHRDKPIREQAENIIHLFTLTNLGAPRAFKYFDTTIARKEYRSTKEVLDATLIHQSITGLYETRIDLSQLGGDGGSGGSGGSGGSGGSGGSGGMDKKYSIGLAIGTNSVGWAVITDEYKVPSKKFKVLGNTDRHSIKKNLIGALLFDSGETAEATRLKRTARRRYTRRKNRICYLQEIFSNEMAKVDDSFFHRLEESFLVEEDKKHERHPIFGNIVDEVAYHEKYPTIYHLRKKLVDSTDKADLRLIYLALAHMIKFRGHFLIEGDLNPDNSDVDKLFIQLVQTYNQLFEENPINASGVDAKAILSARLSKSRRLENLIAQLPGEKKNGLFGNLIALSLGLTPNFKSNFDLAEDAKLQLSKDTYDDDLDNLLAQIGDQYADLFLAAKNLSDAILLSDILRVNTEITKAPLSASMIKRYDEHHQDLTLLKALVRQQLPEKYKEIFFDQSKNGYAGYIDGGASQEEFYKFIKPILEKMDGTEELLVKLNREDLLRKQRTFDNGSIPHQIHLGELHAILRRQEDFYPFLKDNREKIEKILTFRIPYYVGPLARGNSRFAWMTRKSEETITPWNFEEVVDKGASAQSFIERMTNFDKNLPNEKVLPKHSLLYEYFTVYNELTKVKYVTEGMRKPAFLSGEQKKAIVDLLFKTNRKVTVKQLKEDYFKKIECFDSVEISGVEDRFNASLGTYHDLLKIIKDKDFLDNEENEDILEDIVLTLTLFEDREMIEERLKTYAHLFDDKVMKQLKRRRYTGWGRLSRKLINGIRDKQSGKTILDFLKSDGFANRNFMQLIHDDSLTFKEDIQKAQVSGQGDSLHEHIANLAGSPAIKKGILQTVKVVDELVKVMGRHKPENIVIEMARENQTTQKGQKNSRERMKRIEEGIKELGSQILKEHPVENTQLQNEKLYLYYLQNGRDMYVDQELDINRLSDYDVDHIVPQSFLKDDSIDNKVLTRSDKNRGKSDNVPSEEVVKKMKNYWRQLLNAKLITQRKFDNLTKAERGGLSELDKAGFIKRQLVETRQITKHVAQILDSRMNTKYDENDKLIREVKVITLKSKLVSDFRKDFQFYKVREINNYHHAHDAYLNAVVGTALIKKYPKLESEFVYGDYKVYDVRKMIAKSEQEGADKRTADGSEFESPKKKRKV

SEQ ID NO: 333 - protein, 1588 aa, Artificial Sequence
  Description of artificial sequence: ABE8.8-m polypeptide sequence
  MISC_FEATURE (1)..(167): Adenosine deaminase sequence
  MISC_FEATURE (168)..(199): Linker sequence
  MISC_FEATURE (200)..(1566): Sequence derived from Cas9
  MISC_FEATURE (1567)..(1588): Bipartite nuclear localization sequence
MSEVEFSHEYWMRHALTLAKRARDEREVPVGAVLVLNNRVIGEGWNRAIGLHDPTAHAEIMALRQGGLVMQNYRLIDATLYVTFEPCVMCAGAMIHSRIGRVVFGVRNAKTGAAGSLMDVLHHPGMNHRVEITEGILADECAALLCRFFRMPRRVFNAQKKAQSSTDSGGSSGGSSGSETPGTSESATPESSGGSSGGSDKKYSIGLAIGTNSVGWAVITDEYKVPSKKFKVLGNTDRHSIKKNLIGALLFDSGETAEATRLKRTARRRYTRRKNRICYLQEIFSNEMAKVDDSFFHRLEESFLVEEDKKHERHPIFGNIVDEVAYHEKYPTIYHLRKKLVDSTDKADLRLIYLALAHMIKFRGHFLIEGDLNPDNSDVDKLFIQLVQTYNQLFEENPINASGVDAKAILSARLSKSRRLENLIAQLPGEKKNGLFGNLIALSLGLTPNFKSNFDLAEDAKLQLSKDTYDDDLDNLLAQIGDQYADLFLAAKNLSDAILLSDILRVNTEITKAPLSASMIKRYDEHHQDLTLLKALVRQQLPEKYKEIFFDQSKNGYAGYIDGGASQEEFYKFIKPILEKMDGTEELLVKLNREDLLRKQRTFDNGSIPHQIHLGELHAILRRQEDFYPFLKDNREKIEKILTFRIPYYVGPLARGNSRFAWMTRKSEETITPWNFEEVVDKGASAQSFIERMTNFDKNLPNEKVLPKHSLLYEYFTVYNELTKVKYVTEGMRKPAFLSGEQKKAIVDLLFKTNRKVTVKQLKEDYFKKIECFDSVEISGVEDRFNASLGTYHDLLKIIKDKDFLDNEENEDILEDIVLTLTLFEDREMIEERLKTYAHLFDDKVMKQLKRRRYTGWGRLSRKLINGIRDKQSGKTILDFLKSDGFANRNFMQLIHDDSLTFKEDIQKAQVSGQGDSLHEHIANLAGSPAIKKGILQTVKVVDELVKVMGRHKPENIVIEMARENQTTQKGQKNSRERMKRIEEGIKELGSQILKEHPVENTQLQNEKLYLYYLQNGRDMYVDQELDINRLSDYDVDHIVPQSFLKDDSIDNKVLTRSDKNRGKSDNVPSEEVVKKMKNYWRQLLNAKLITQRKFDNLTKAERGGLSELDKAGFIKRQLVETRQITKHVAQILDSRMNTKYDENDKLIREVKVITLKSKLVSDFRKDFQFYKVREINNYHHAHDAYLNAVVGTALIKKYPKLESEFVYGDYKVYDVRKMIAKSEQEIGKATAKYFFYSNIMNFFKTEITLANGEIRKRPLIETNGETGEIVWDKGRDFATVRKVLSMPQVNIVKKTEVQTGGFSKESILPKRNSDKLIARKKDWDPKKYGGFDSPTVAYSVLVVAKVEKGKSKKLKSVKELLGITIMERSSFEKNPIDFLEAKGYKEVKKDLIIKLPKYSLFELENGRKRMLASAGELQKGNELALPSKYVNFLYLASHYEKLKGSPEDNEQKQLFVEQHKHYLDEIIEQISEFSKRVILADANLDKVLSAYNKHRDKPIREQAENIIHLFTLTNLGAPAAFKYFDTTIDRKRYTSTKEVLDATLIHQSITGLYETRIDLSQLGGDEGADKRTADGSEFESPKKKRKV

SEQ ID NO: 334 - protein, 1786 aa, Artificial Sequence
  Description of artificial sequence: ABE8.8-d polypeptide sequence
  MISC_FEATURE (1)..(167): Adenosine deaminase sequence
  MISC_FEATURE (168)..(199): Linker sequence
  MISC_FEATURE (200)..(365): Adenosine deaminase sequence
  MISC_FEATURE (366)..(397): Linker sequence
  MISC_FEATURE (398)..(1764): Sequence derived from Cas9
  MISC_FEATURE (1765)..(1786): Bipartite nuclear localization sequence
MSEVEFSHEYWMRHALTLAKRAWDEREVPVGAVLVHNNRVIGEGWNRPIGRHDPTAHAEIMALRQGGLVMQNYRLIDATLYVTLEPCVMCAGAMIHSRIGRVVFGARDAKTGAAGSLMDVLHHPGMNHRVEITEGILADECAALLSDFFRMRRQEIKAQKKAQSSTDSGGSSGGSSGSETPGTSESATPESSGGSSGGSSEVEFSHEYWMRHALTLAKRARDEREVPVGAVLVLNNRVIGEGWNRAIGLHDPTAHAEIMALRQGGLVMQNYRLIDATLYVTFEPCVMCAGAMIHSRIGRVVFGVRNAKTGAAGSLMDVLHHPGMNHRVEITEGILADECAALLCRFFRMPRRVFNAQKKAQSSTDSGGSSGGSSGSETPGTSESATPESSGGSSGGSDKKYSIGLAIGTNSVGWAVITDEYKVPSKKFKVLGNTDRHSIKKNLIGALLFDSGETAEATRLKRTARRRYTRRKNRICYLQEIFSNEMAKVDDSFFHRLEESFLVEEDKKHERHPIFGNIVDEVAYHEKYPTIYHLRKKLVDSTDKADLRLIYLALAHMIKFRGHFLIEGDLNPDNSDVDKLFIQLVQTYNQLFEENPINASGVDAKAILSARLSKSRRLENLIAQLPGEKKNGLFGNLIALSLGLTPNFKSNFDLAEDAKLQLSKDTYDDDLDNLLAQIGDQYADLFLAAKNLSDAILLSDILRVNTEITKAPLSASMIKRYDEHHQDLTLLKALVRQQLPEKYKEIFFDQSKNGYAGYIDGGASQEEFYKFIKPILEKMDGTEELLVKLNREDLLRKQRTFDNGSIPHQIHLGELHAILRRQEDFYPFLKDNREKIEKILTFRIPYYVGPLARGNSRFAWMTRKSEETITPWNFEEVVDKGASAQSFIERMTNFDKNLPNEKVLPKHSLLYEYFTVYNELTKVKYVTEGMRKPAFLSGEQKKAIVDLLFKTNRKVTVKQLKEDYFKKIECFDSVEISGVEDRFNASLGTYHDLLKIIKDKDFLDNEENEDILEDIVLTLTLFEDREMIEERLKTYAHLFDDKVMKQLKRRRYTGWGRLSRKLINGIRDKQSGKTILDFLKSDGFANRNFMQLIHDDSLTFKEDIQKAQVSGQGDSLHEHIANLAGSPAIKKGILQTVKVVDELVKVMGRHKPENIVIEMARENQTTQKGQKNSRERMKRIEEGIKELGSQILKEHPVENTQLQNEKLYLYYLQNGRDMYVDQELDINRLSDYDVDHIVPQSFLKDDSIDNKVLTRSDKNRGKSDNVPSEEVVKKMKNYWRQLLNAKLITQRKFDNLTKAERGGLSELDKAGFIKRQLVETRQITKHVAQILDSRMNTKYDENDKLIREVKVITLKSKLVSDFRKDFQFYKVREINNYHHAHDAYLNAVVGTALIKKYPKLESEFVYGDYKVYDVRKMIAKSEQEIGKATAKYFFYSNIMNFFKTEITLANGEIRKRPLIETNGETGEIVWDKGRDFATVRKVLSMPQVNIVKKTEVQTGGFSKESILPKRNSDKLIARKKDWDPKKYGGFDSPTVAYSVLVVAKVEKGKSKKLKSVKELLGITIMERSSFEKNPIDFLEAKGYKEVKKDLIIKLPKYSLFELENGRKRMLASAGELQKGNELALPSKYVNFLYLASHYEKLKGSPEDNEQKQLFVEQHKHYLDEIIEQISEFSKRVILADANLDKVLSAYNKHRDKPIREQAENIIHLFTLTNLGAPAAFKYFDTTIDRKRYTSTKEVLDATLIHQSITGLYETRIDLSQLGGDEGADKRTADGSEFESPKKKRKV

SEQ ID NO: 335 - protein, 1588 aa, Artificial Sequence
  Description of artificial sequence: ABE8.13-m polypeptide sequence
  MISC_FEATURE (1)..(167): Adenosine deaminase sequence
  MISC_FEATURE (168)..(199): Linker sequence
  MISC_FEATURE (200)..(1566): Sequence derived from Cas9
  MISC_FEATURE (1567)..(1588): Bipartite nuclear localization sequence
MSEVEFSHEYWMRHALTLAKRARDEREVPVGAVLVLNNRVIGEGWNRAIGLHDPTAHAEIMALRQGGLVMQNYRLYDATLYVTFEPCVMCAGAMIHSRIGRVVFGVRNAKTGAAGSLMDVLHHPGMNHRVEITEGILADECAALLCRFFRMPRRVFNAQKKAQSSTDSGGSSGGSSGSETPGTSESATPESSGGSSGGSDKKYSIGLAIGTNSVGWAVITDEYKVPSKKFKVLGNTDRHSIKKNLIGALLFDSGETAEATRLKRTARRRYTRRKNRICYLQEIFSNEMAKVDDSFFHRLEESFLVEEDKKHERHPIFGNIVDEVAYHEKYPTIYHLRKKLVDSTDKADLRLIYLALAHMIKFRGHFLIEGDLNPDNSDVDKLFIQLVQTYNQLFEENPINASGVDAKAILSARLSKSRRLENLIAQLPGEKKNGLFGNLIALSLGLTPNFKSNFDLAEDAKLQLSKDTYDDDLDNLLAQIGDQYADLFLAAKNLSDAILLSDILRVNTEITKAPLSASMIKRYDEHHQDLTLLKALVRQQLPEKYKEIFFDQSKNGYAGYIDGGASQEEFYKFIKPILEKMDGTEELLVKLNREDLLRKQRTFDNGSIPHQIHLGELHAILRRQEDFYPFLKDNREKIEKILTFRIPYYVGPLARGNSRFAWMTRKSEETITPWNFEEVVDKGASAQSFIERMTNFDKNLPNEKVLPKHSLLYEYFTVYNELTKVKYVTEGMRKPAFLSGEQKKAIVDLLFKTNRKVTVKQLKEDYFKKIECFDSVEISGVEDRFNASLGTYHDLLKIIKDKDFLDNEENEDILEDIVLTLTLFEDREMIEERLKTYAHLFDDKVMKQLKRRRYTGWGRLSRKLINGIRDKQSGKTILDFLKSDGFANRNFMQLIHDDSLTFKEDIQKAQVSGQGDSLHEHIANLAGSPAIKKGILQTVKVVDELVKVMGRHKPENIVIEMARENQTTQKGQKNSRERMKRIEEGIKELGSQILKEHPVENTQLQNEKLYLYYLQNGRDMYVDQELDINRLSDYDVDHIVPQSFLKDDSIDNKVLTRSDKNRGKSDNVPSEEVVKKMKNYWRQLLNAKLITQRKFDNLTKAERGGLSELDKAGFIKRQLVETRQITKHVAQILDSRMNTKYDENDKLIREVKVITLKSKLVSDFRKDFQFYKVREINNYHHAHDAYLNAVVGTALIKKYPKLESEFVYGDYKVYDVRKMIAKSEQEIGKATAKYFFYSNIMNFFKTEITLANGEIRKRPLIETNGETGEIVWDKGRDFATVRKVLSMPQVNIVKKTEVQTGGFSKESILPKRNSDKLIARKKDWDPKKYGGFDSPTVAYSVLVVAKVEKGKSKKLKSVKELLGITIMERSSFEKNPIDFLEAKGYKEVKKDLIIKLPKYSLFELENGRKRMLASAGELQKGNELALPSKYVNFLYLASHYEKLKGSPEDNEQKQLFVEQHKHYLDEIIEQISEFSKRVILADANLDKVLSAYNKHRDKPIREQAENIIHLFTLTNLGAPAAFKYFDTTIDRKRYTSTKEVLDATLIHQSITGLYETRIDLSQLGGDEGADKRTADGSEFESPKKKRKV

SEQ ID NO: 336 - protein, 1786 aa, Artificial Sequence
  Description of artificial sequence: ABE8.13-d polypeptide sequence
  MISC_FEATURE (1)..(167): Adenosine deaminase sequence
  MISC_FEATURE (168)..(199): Linker sequence
  MISC_FEATURE (200)..(365): Adenosine deaminase sequence
  MISC_FEATURE (366)..(397): Linker sequence
  MISC_FEATURE (398)..(1764): Sequence derived from Cas9
  MISC_FEATURE (1765)..(1786): Bipartite nuclear localization sequence
MSEVEFSHEYWMRHALTLAKRAWDEREVPVGAVLVHNNRVIGEGWNRPIGRHDPTAHAEIMALRQGGLVMQNYRLIDATLYVTLEPCVMCAGAMIHSRIGRVVFGARDAKTGAAGSLMDVLHHPGMNHRVEITEGILADECAALLSDFFRMRRQEIKAQKKAQSSTDSGGSSGGSSGSETPGTSESATPESSGGSSGGSSEVEFSHEYWMRHALTLAKRARDEREVPVGAVLVLNNRVIGEGWNRAIGLHDPTAHAEIMALRQGGLVMQNYRLYDATLYVTFEPCVMCAGAMIHSRIGRVVFGVRNAKTGAAGSLMDVLHHPGMNHRVEITEGILADECAALLCRFFRMPRRVFNAQKKAQSSTDSGGSSGGSSGSETPGTSESATPESSGGSSGGSDKKYSIGLAIGTNSVGWAVITDEYKVPSKKFKVLGNTDRHSIKKNLIGALLFDSGETAEATRLKRTARRRYTRRKNRICYLQEIFSNEMAKVDDSFFHRLEESFLVEEDKKHERHPIFGNIVDEVAYHEKYPTIYHLRKKLVDSTDKADLRLIYLALAHMIKFRGHFLIEGDLNPDNSDVDKLFIQLVQTYNQLFEENPINASGVDAKAILSARLSKSRRLENLIAQLPGEKKNGLFGNLIALSLGLTPNFKSNFDLAEDAKLQLSKDTYDDDLDNLLAQIGDQYADLFLAAKNLSDAILLSDILRVNTEITKAPLSASMIKRYDEHHQDLTLLKALVRQQLPEKYKEIFFDQSKNGYAGYIDGGASQEEFYKFIKPILEKMDGTEELLVKLNREDLLRKQRTFDNGSIPHQIHLGELHAILRRQEDFYPFLKDNREKIEKILTFRIPYYVGPLARGNSRFAWMTRKSEETITPWNFEEVVDKGASAQSFIERMTNFDKNLPNEKVLPKHSLLYEYFTVYNELTKVKYVTEGMRKPAFLSGEQKKAIVDLLFKTNRKVTVKQLKEDYFKKIECFDSVEISGVEDRFNASLGTYHDLLKIIKDKDFLDNEENEDILEDIVLTLTLFEDREMIEERLKTYAHLFDDKVMKQLKRRRYTGWGRLSRKLINGIRDKQSGKTILDFLKSDGFANRNFMQLIHDDSLTFKEDIQKAQVSGQGDSLHEHIANLAGSPAIKKGILQTVKVVDELVKVMGRHKPENIVIEMARENQTTQKGQKNSRERMKRIEEGIKELGSQILKEHPVENTQLQNEKLYLYYLQNGRDMYVDQELDINRLSDYDVDHIVPQSFLKDDSIDNKVLTRSDKNRGKSDNVPSEEVVKKMKNYWRQLLNAKLITQRKFDNLTKAERGGLSELDKAGFIKRQLVETRQITKHVAQILDSRMNTKYDENDKLIREVKVITLKSKLVSDFRKDFQFYKVREINNYHHAHDAYLNAVVGTALIKKYPKLESEFVYGDYKVYDVRKMIAKSEQEIGKATAKYFFYSNIMNFFKTEITLANGEIRKRPLIETNGETGEIVWDKGRDFATVRKVLSMPQVNIVKKTEVQTGGFSKESILPKRNSDKLIARKKDWDPKKYGGFDSPTVAYSVLVVAKVEKGKSKKLKSVKELLGITIMERSSFEKNPIDFLEAKGYKEVKKDLIIKLPKYSLFELENGRKRMLASAGELQKGNELALPSKYVNFLYLASHYEKLKGSPEDNEQKQLFVEQHKHYLDEIIEQISEFSKRVILADANLDKVLSAYNKHRDKPIREQAENIIHLFTLTNLGAPAAFKYFDTTIDRKRYTSTKEVLDATLIHQSITGLYETRIDLSQLGGDEGADKRTADGSEFESPKKKRKV

SEQ ID NO: 337 - protein, 1588 aa, Artificial Sequence
  Description of artificial sequence: ABE8.17-m polypeptide sequence
  MISC_FEATURE (1)..(167): Adenosine deaminase sequence
  MISC_FEATURE (168)..(199): Linker sequence
  MISC_FEATURE (200)..(1566): Sequence derived from Cas9
  MISC_FEATURE (1567)..(1588): Bipartite nuclear localization sequence
MSEVEFSHEYWMRHALTLAKRARDEREVPVGAVLVLNNRVIGEGWNRAIGLHDPTAHAEIMALRQGGLVMQNYRLIDATLYSTFEPCVMCAGAMIHSRIGRVVFGVRNAKTGAAGSLMDVLHYPGMNHRVEITEGILADECAALLCYFFRMPRRVFNAQKKAQSSTDSGGSSGGSSGSETPGTSESATPESSGGSSGGSDKKYSIGLAIGTNSVGWAVITDEYKVPSKKFKVLGNTDRHSIKKNLIGALLFDSGETAEATRLKRTARRRYTRRKNRICYLQEIFSNEMAKVDDSFFHRLEESFLVEEDKKHERHPIFGNIVDEVAYHEKYPTIYHLRKKLVDSTDKADLRLIYLALAHMIKFRGHFLIEGDLNPDNSDVDKLFIQLVQTYNQLFEENPINASGVDAKAILSARLSKSRRLENLIAQLPGEKKNGLFGNLIALSLGLTPNFKSNFDLAEDAKLQLSKDTYDDDLDNLLAQIGDQYADLFLAAKNLSDAILLSDILRVNTEITKAPLSASMIKRYDEHHQDLTLLKALVRQQLPEKYKEIFFDQSKNGYAGYIDGGASQEEFYKFIKPILEKMDGTEELLVKLNREDLLRKQRTFDNGSIPHQIHLGELHAILRRQEDFYPFLKDNREKIEKILTFRIPYYVGPLARGNSRFAWMTRKSEETITPWNFEEVVDKGASAQSFIERMTNFDKNLPNEKVLPKHSLLYEYFTVYNELTKVKYVTEGMRKPAFLSGEQKKAIVDLLFKTNRKVTVKQLKEDYFKKIECFDSVEISGVEDRFNASLGTYHDLLKIIKDKDFLDNEENEDILEDIVLTLTLFEDREMIEERLKTYAHLFDDKVMKQLKRRRYTGWGRLSRKLINGIRDKQSGKTILDFLKSDGFANRNFMQLIHDDSLTFKEDIQKAQVSGQGDSLHEHIANLAGSPAIKKGILQTVKVVDELVKVMGRHKPENIVIEMARENQTTQKGQKNSRERMKRIEEGIKELGSQILKEHPVENTQLQNEKLYLYYLQNGRDMYVDQELDINRLSDYDVDHIVPQSFLKDDSIDNKVLTRSDKNRGKSDNVPSEEVVKKMKNYWRQLLNAKLITQRKFDNLTKAERGGLSELDKAGFIKRQLVETRQITKHVAQILDSRMNTKYDENDKLIREVKVITLKSKLVSDFRKDFQFYKVREINNYHHAHDAYLNAVVGTALIKKYPKLESEFVYGDYKVYDVRKMIAKSEQEIGKATAKYFFYSNIMNFFKTEITLANGEIRKRPLIETNGETGEIVWDKGRDFATVRKVLSMPQVNIVKKTEVQTGGFSKESILPKRNSDKLIARKKDWDPKKYGGFDSPTVAYSVLVVAKVEKGKSKKLKSVKELLGITIMERSSFEKNPIDFLEAKGYKEVKKDLIIKLPKYSLFELENGRKRMLASAGELQKGNELALPSKYVNFLYLASHYEKLKGSPEDNEQKQLFVEQHKHYLDEIIEQISEFSKRVILADANLDKVLSAYNKHRDKPIREQAENIIHLFTLTNLGAPAAFKYFDTTIDRKRYTSTKEVLDATLIHQSITGLYETRIDLSQLGGDEGADKRTADGSEFESPKKKRKV

SEQ ID NO: 338 - protein, 1786 aa, Artificial Sequence
  Description of artificial sequence: ABE8.17-d polypeptide sequence
  MISC_FEATURE (1)..(167): Adenosine deaminase sequence
  MISC_FEATURE (168)..(199): Linker sequence
  MISC_FEATURE (200)..(365): Adenosine deaminase sequence
  MISC_FEATURE (366)..(397): Linker sequence
  MISC_FEATURE (398)..(1764): Sequence derived from Cas9
  MISC_FEATURE (1765)..(1786): Bipartite nuclear localization sequence
MSEVEFSHEYWMRHALTLAKRAWDEREVPVGAVLVHNNRVIGEGWNRPIGRHDPTAHAEIMALRQGGLVMQNYRLIDATLYVTLEPCVMCAGAMIHSRIGRVVFGARDAKTGAAGSLMDVLHHPGMNHRVEITEGILADECAALLSDFFRMRRQEIKAQKKAQSSTDSGGSSGGSSGSETPGTSESATPESSGGSSGGSSEVEFSHEYWMRHALTLAKRARDEREVPVGAVLVLNNRVIGEGWNRAIGLHDPTAHAEIMALRQGGLVMQNYRLIDATLYSTFEPCVMCAGAMIHSRIGRVVFGVRNAKTGAAGSLMDVLHYPGMNHRVEITEGILADECAALLCYFFRMPRRVFNAQKKAQSSTDSGGSSGGSSGSETPGTSESATPESSGGSSGGSDKKYSIGLAIGTNSVGWAVITDEYKVPSKKFKVLGNTDRHSIKKNLIGALLFDSGETAEATRLKRTARRRYTRRKNRICYLQEIFSNEMAKVDDSFFHRLEESFLVEEDKKHERHPIFGNIVDEVAYHEKYPTIYHLRKKLVDSTDKADLRLIYLALAHMIKFRGHFLIEGDLNPDNSDVDKLFIQLVQTYNQLFEENPINASGVDAKAILSARLSKSRRLENLIAQLPGEKKNGLFGNLIALSLGLTPNFKSNFDLAEDAKLQLSKDTYDDDLDNLLAQIGDQYADLFLAAKNLSDAILLSDILRVNTEITKAPLSASMIKRYDEHHQDLTLLKALVRQQLPEKYKEIFFDQSKNGYAGYIDGGASQEEFYKFIKPILEKMDGTEELLVKLNREDLLRKQRTFDNGSIPHQIHLGELHAILRRQEDFYPFLKDNREKIEKILTFRIPYYVGPLARGNSRFAWMTRKSEETITPWNFEEVVDKGASAQSFIERMTNFDKNLPNEKVLPKHSLLYEYFTVYNELTKVKYVTEGMRKPAFLSGEQKKAIVDLLFKTNRKVTVKQLKEDYFKKIECFDSVEISGVEDRFNASLGTYHDLLKIIKDKDFLDNEENEDILEDIVLTLTLFEDREMIEERLKTYAHLFDDKVMKQLKRRRYTGWGRLSRKLINGIRDKQSGKTILDFLKSDGFANRNFMQLIHDDSLTFKEDIQKAQVSGQGDSLHEHIANLAGSPAIKKGILQTVKVVDELVKVMGRHKPENIVIEMARENQTTQKGQKNSRERMKRIEEGIKELGSQILKEHPVENTQLQNEKLYLYYLQNGRDMYVDQELDINRLSDYDVDHIVPQSFLKDDSIDNKVLTRSDKNRGKSDNVPSEEVVKKMKNYWRQLLNAKLITQRKFDNLTKAERGGLSELDKAGFIKRQLVETRQITKHVAQILDSRMNTKYDENDKLIREVKVITLKSKLVSDFRKDFQFYKVREINNYHHAHDAYLNAVVGTALIKKYPKLESEFVYGDYKVYDVRKMIAKSEQEIGKATAKYFFYSNIMNFFKTEITLANGEIRKRPLIETNGETGEIVWDKGRDFATVRKVLSMPQVNIVKKTEVQTGGFSKESILPKRNSDKLIARKKDWDPKKYGGFDSPTVAYSVLVVAKVEKGKSKKLKSVKELLGITIMERSSFEKNPIDFLEAKGYKEVKKDLIIKLPKYSLFELENGRKRMLASAGELQKGNELALPSKYVNFLYLASHYEKLKGSPEDNEQKQLFVEQHKHYLDEIIEQISEFSKRVILADANLDKVLSAYNKHRDKPIREQAENIIHLFTLTNLGAPAAFKYFDTTIDRKRYTSTKEVLDATLIHQSITGLYETRIDLSQLGGDEGADKRTADGSEFESPKKKRKV

SEQ ID NO: 339 - protein, 1588 aa, Artificial Sequence
  Description of artificial sequence: ABE8.20-m polypeptide sequence
  MISC_FEATURE (1)..(167): Adenosine deaminse sequence
  MISC_FEATURE (168)..(199): Linker sequence
  MISC_FEATURE (200)..(1566): Sequence derived from Cas9
  MISC_FEATURE (1567)..(1588): Bipartite nuclear localization sequence
MSEVEFSHEYWMRHALTLAKRARDEREVPVGAVLVLNNRVIGEGWNRAIGLHDPTAHAEIMALRQGGLVMQNYRLYDATLYSTFEPCVMCAGAMIHSRIGRVVFGVRNAKTGAAGSLMDVLHHPGMNHRVEITEGILADECAALLCRFFRMPRRVFNAQKKAQSSTDSGGSSGGSSGSETPGTSESATPESSGGSSGGSDKKYSIGLAIGTNSVGWAVITDEYKVPSKKFKVLGNTDRHSIKKNLIGALLFDSGETAEATRLKRTARRRYTRRKNRICYLQEIFSNEMAKVDDSFFHRLEESFLVEEDKKHERHPIFGNIVDEVAYHEKYPTIYHLRKKLVDSTDKADLRLIYLALAHMIKFRGHFLIEGDLNPDNSDVDKLFIQLVQTYNQLFEENPINASGVDAKAILSARLSKSRRLENLIAQLPGEKKNGLFGNLIALSLGLTPNFKSNFDLAEDAKLQLSKDTYDDDLDNLLAQIGDQYADLFLAAKNLSDAILLSDILRVNTEITKAPLSASMIKRYDEHHQDLTLLKALVRQQLPEKYKEIFFDQSKNGYAGYIDGGASQEEFYKFIKPILEKMDGTEELLVKLNREDLLRKQRTFDNGSIPHQIHLGELHAILRRQEDFYPFLKDNREKIEKILTFRIPYYVGPLARGNSRFAWMTRKSEETITPWNFEEVVDKGASAQSFIERMTNFDKNLPNEKVLPKHSLLYEYFTVYNELTKVKYVTEGMRKPAFLSGEQKKAIVDLLFKTNRKVTVKQLKEDYFKKIECFDSVEISGVEDRFNASLGTYHDLLKIIKDKDFLDNEENEDILEDIVLTLTLFEDREMIEERLKTYAHLFDDKVMKQLKRRRYTGWGRLSRKLINGIRDKQSGKTILDFLKSDGFANRNFMQLIHDDSLTFKEDIQKAQVSGQGDSLHEHIANLAGSPAIKKGILQTVKVVDELVKVMGRHKPENIVIEMARENQTTQKGQKNSRERMKRIEEGIKELGSQILKEHPVENTQLQNEKLYLYYLQNGRDMYVDQELDINRLSDYDVDHIVPQSFLKDDSIDNKVLTRSDKNRGKSDNVPSEEVVKKMKNYWRQLLNAKLITQRKFDNLTKAERGGLSELDKAGFIKRQLVETRQITKHVAQILDSRMNTKYDENDKLIREVKVITLKSKLVSDFRKDFQFYKVREINNYHHAHDAYLNAVVGTALIKKYPKLESEFVYGDYKVYDVRKMIAKSEQEIGKATAKYFFYSNIMNFFKTEITLANGEIRKRPLIETNGETGEIVWDKGRDFATVRKVLSMPQVNIVKKTEVQTGGFSKESILPKRNSDKLIARKKDWDPKKYGGFDSPTVAYSVLVVAKVEKGKSKKLKSVKELLGITIMERSSFEKNPIDFLEAKGYKEVKKDLIIKLPKYSLFELENGRKRMLASAGELQKGNELALPSKYVNFLYLASHYEKLKGSPEDNEQKQLFVEQHKHYLDEIIEQISEFSKRVILADANLDKVLSAYNKHRDKPIREQAENIIHLFTLTNLGAPAAFKYFDTTIDRKRYTSTKEVLDATLIHQSITGLYETRIDLSQLGGDEGADKRTADGSEFESPKKKRKV

SEQ ID NO: 340 - protein, 1786 aa, Artificial Sequence
  Description of artificial sequence: ABE8.20-d polypeptide sequence
  MISC_FEATURE (1)..(167): Adenosine deaminase sequence
  MISC_FEATURE (168)..(199): Linker sequence
  MISC_FEATURE (200)..(365): Adenosine deaminase sequence
  MISC_FEATURE (366)..(397): Linker sequence
  MISC_FEATURE (398)..(1764): Sequence derived from Cas9
  MISC_FEATURE (1765)..(1786): Bipartite nuclear localization sequence
MSEVEFSHEYWMRHALTLAKRAWDEREVPVGAVLVHNNRVIGEGWNRPIGRHDPTAHAEIMALRQGGLVMQNYRLIDATLYVTLEPCVMCAGAMIHSRIGRVVFGARDAKTGAAGSLMDVLHHPGMNHRVEITEGILADECAALLSDFFRMRRQEIKAQKKAQSSTDSGGSSGGSSGSETPGTSESATPESSGGSSGGSSEVEFSHEYWMRHALTLAKRARDEREVPVGAVLVLNNRVIGEGWNRAIGLHDPTAHAEIMALRQGGLVMQNYRLYDATLYSTFEPCVMCAGAMIHSRIGRVVFGVRNAKTGAAGSLMDVLHHPGMNHRVEITEGILADECAALLCRFFRMPRRVFNAQKKAQSSTDSGGSSGGSSGSETPGTSESATPESSGGSSGGSDKKYSIGLAIGTNSVGWAVITDEYKVPSKKFKVLGNTDRHSIKKNLIGALLFDSGETAEATRLKRTARRRYTRRKNRICYLQEIFSNEMAKVDDSFFHRLEESFLVEEDKKHERHPIFGNIVDEVAYHEKYPTIYHLRKKLVDSTDKADLRLIYLALAHMIKFRGHFLIEGDLNPDNSDVDKLFIQLVQTYNQLFEENPINASGVDAKAILSARLSKSRRLENLIAQLPGEKKNGLFGNLIALSLGLTPNFKSNFDLAEDAKLQLSKDTYDDDLDNLLAQIGDQYADLFLAAKNLSDAILLSDILRVNTEITKAPLSASMIKRYDEHHQDLTLLKALVRQQLPEKYKEIFFDQSKNGYAGYIDGGASQEEFYKFIKPILEKMDGTEELLVKLNREDLLRKQRTFDNGSIPHQIHLGELHAILRRQEDFYPFLKDNREKIEKILTFRIPYYVGPLARGNSRFAWMTRKSEETITPWNFEEVVDKGASAQSFIERMTNFDKNLPNEKVLPKHSLLYEYFTVYNELTKVKYVTEGMRKPAFLSGEQKKAIVDLLFKTNRKVTVKQLKEDYFKKIECFDSVEISGVEDRFNASLGTYHDLLKIIKDKDFLDNEENEDILEDIVLTLTLFEDREMIEERLKTYAHLFDDKVMKQLKRRRYTGWGRLSRKLINGIRDKQSGKTILDFLKSDGFANRNFMQLIHDDSLTFKEDIQKAQVSGQGDSLHEHIANLAGSPAIKKGILQTVKVVDELVKVMGRHKPENIVIEMARENQTTQKGQKNSRERMKRIEEGIKELGSQILKEHPVENTQLQNEKLYLYYLQNGRDMYVDQELDINRLSDYDVDHIVPQSFLKDDSIDNKVLTRSDKNRGKSDNVPSEEVVKKMKNYWRQLLNAKLITQRKFDNLTKAERGGLSELDKAGFIKRQLVETRQITKHVAQILDSRMNTKYDENDKLIREVKVITLKSKLVSDFRKDFQFYKVREINNYHHAHDAYLNAVVGTALIKKYPKLESEFVYGDYKVYDVRKMIAKSEQEIGKATAKYFFYSNIMNFFKTEITLANGEIRKRPLIETNGETGEIVWDKGRDFATVRKVLSMPQVNIVKKTEVQTGGFSKESILPKRNSDKLIARKKDWDPKKYGGFDSPTVAYSVLVVAKVEKGKSKKLKSVKELLGITIMERSSFEKNPIDFLEAKGYKEVKKDLIIKLPKYSLFELENGRKRMLASAGELQKGNELALPSKYVNFLYLASHYEKLKGSPEDNEQKQLFVEQHKHYLDEIIEQISEFSKRVILADANLDKVLSAYNKHRDKPIREQAENIIHLFTLTNLGAPAAFKYFDTTIDRKRYTSTKEVLDATLIHQSITGLYETRIDLSQLGGDEGADKRTADGSEFESPKKKRKV

SEQ ID NO: 341 - protein, 1588 aa, Artificial Sequence
  Description of artificial sequence: 01. monoABE8.1_bpNLS + Y147T polypeptide sequence
MSEVEFSHEYWMRHALTLAKRARDEREVPVGAVLVLNNRVIGEGWNRAIGLHDPTAHAEIMALRQGGLVMQNYRLIDATLYVTFEPCVMCAGAMIHSRIGRVVFGVRNAKTGAAGSLMDVLHYPGMNHRVEITEGILADECAALLCTFFRMPRQVFNAQKKAQSSTDSGGSSGGSSGSETPGTSESATPESSGGSSGGSDKKYSIGLAIGTNSVGWAVITDEYKVPSKKFKVLGNTDRHSIKKNLIGALLFDSGETAEATRLKRTARRRYTRRKNRICYLQEIFSNEMAKVDDSFFHRLEESFLVEEDKKHERHPIFGNIVDEVAYHEKYPTIYHLRKKLVDSTDKADLRLIYLALAHMIKFRGHFLIEGDLNPDNSDVDKLFIQLVQTYNQLFEENPINASGVDAKAILSARLSKSRRLENLIAQLPGEKKNGLFGNLIALSLGLTPNFKSNFDLAEDAKLQLSKDTYDDDLDNLLAQIGDQYADLFLAAKNLSDAILLSDILRVNTEITKAPLSASMIKRYDEHHQDLTLLKALVRQQLPEKYKEIFFDQSKNGYAGYIDGGASQEEFYKFIKPILEKMDGTEELLVKLNREDLLRKQRTFDNGSIPHQIHLGELHAILRRQEDFYPFLKDNREKIEKILTFRIPYYVGPLARGNSRFAWMTRKSEETITPWNFEEVVDKGASAQSFIERMTNFDKNLPNEKVLPKHSLLYEYFTVYNELTKVKYVTEGMRKPAFLSGEQKKAIVDLLFKTNRKVTVKQLKEDYFKKIECFDSVEISGVEDRFNASLGTYHDLLKIIKDKDFLDNEENEDILEDIVLTLTLFEDREMIEERLKTYAHLFDDKVMKQLKRRRYTGWGRLSRKLINGIRDKQSGKTILDFLKSDGFANRNFMQLIHDDSLTFKEDIQKAQVSGQGDSLHEHIANLAGSPAIKKGILQTVKVVDELVKVMGRHKPENIVIEMARENQTTQKGQKNSRERMKRIEEGIKELGSQILKEHPVENTQLQNEKLYLYYLQNGRDMYVDQELDINRLSDYDVDHIVPQSFLKDDSIDNKVLTRSDKNRGKSDNVPSEEVVKKMKNYWRQLLNAKLITQRKFDNLTKAERGGLSELDKAGFIKRQLVETRQITKHVAQILDSRMNTKYDENDKLIREVKVITLKSKLVSDFRKDFQFYKVREINNYHHAHDAYLNAVVGTALIKKYPKLESEFVYGDYKVYDVRKMIAKSEQEIGKATAKYFFYSNIMNFFKTEITLANGEIRKRPLIETNGETGEIVWDKGRDFATVRKVLSMPQVNIVKKTEVQTGGFSKESILPKRNSDKLIARKKDWDPKKYGGFVSPTVAYSVLVVAKVEKGKSKKLKSVKELLGITIMERSSFEKNPIDFLEAKGYKEVKKDLIIKLPKYSLFELENGRKRMLASARELQKGNELALPSKYVNFLYLASHYEKLKGSPEDNEQKQLFVEQHKHYLDEIIEQISEFSKRVILADANLDKVLSAYNKHRDKPIREQAENIIHLFTLTNLGAPAAFKYFDTTIDRKQYRSTKEVLDATLIHQSITGLYETRIDLSQLGGDEGADKRTADGSEFESPKKKRKV

SEQ ID NO: 342 - protein, 1588 aa, Artificial Sequence
  Description of artificial sequence: 02. monoABE8.1_bpNLS + Y147R polypeptide sequence
MSEVEFSHEYWMRHALTLAKRARDEREVPVGAVLVLNNRVIGEGWNRAIGLHDPTAHAEIMALRQGGLVMQNYRLIDATLYVTFEPCVMCAGAMIHSRIGRVVFGVRNAKTGAAGSLMDVLHYPGMNHRVEITEGILADECAALLCRFFRMPRQVFNAQKKAQSSTDSGGSSGGSSGSETPGTSESATPESSGGSSGGSDKKYSIGLAIGTNSVGWAVITDEYKVPSKKFKVLGNTDRHSIKKNLIGALLFDSGETAEATRLKRTARRRYTRRKNRICYLQEIFSNEMAKVDDSFFHRLEESFLVEEDKKHERHPIFGNIVDEVAYHEKYPTIYHLRKKLVDSTDKADLRLIYLALAHMIKFRGHFLIEGDLNPDNSDVDKLFIQLVQTYNQLFEENPINASGVDAKAILSARLSKSRRLENLIAQLPGEKKNGLFGNLIALSLGLTPNFKSNFDLAEDAKLQLSKDTYDDDLDNLLAQIGDQYADLFLAAKNLSDAILLSDILRVNTEITKAPLSASMIKRYDEHHQDLTLLKALVRQQLPEKYKEIFFDQSKNGYAGYIDGGASQEEFYKFIKPILEKMDGTEELLVKLNREDLLRKQRTFDNGSIPHQIHLGELHAILRRQEDFYPFLKDNREKIEKILTFRIPYYVGPLARGNSRFAWMTRKSEETITPWNFEEVVDKGASAQSFIERMTNFDKNLPNEKVLPKHSLLYEYFTVYNELTKVKYVTEGMRKPAFLSGEQKKAIVDLLFKTNRKVTVKQLKEDYFKKIECFDSVEISGVEDRFNASLGTYHDLLKIIKDKDFLDNEENEDILEDIVLTLTLFEDREMIEERLKTYAHLFDDKVMKQLKRRRYTGWGRLSRKLINGIRDKQSGKTILDFLKSDGFANRNFMQLIHDDSLTFKEDIQKAQVSGQGDSLHEHIANLAGSPAIKKGILQTVKVVDELVKVMGRHKPENIVIEMARENQTTQKGQKNSRERMKRIEEGIKELGSQILKEHPVENTQLQNEKLYLYYLQNGRDMYVDQELDINRLSDYDVDHIVPQSFLKDDSIDNKVLTRSDKNRGKSDNVPSEEVVKKMKNYWRQLLNAKLITQRKFDNLTKAERGGLSELDKAGFIKRQLVETRQITKHVAQILDSRMNTKYDENDKLIREVKVITLKSKLVSDFRKDFQFYKVREINNYHHAHDAYLNAVVGTALIKKYPKLESEFVYGDYKVYDVRKMIAKSEQEIGKATAKYFFYSNIMNFFKTEITLANGEIRKRPLIETNGETGEIVWDKGRDFATVRKVLSMPQVNIVKKTEVQTGGFSKESILPKRNSDKLIARKKDWDPKKYGGFVSPTVAYSVLVVAKVEKGKSKKLKSVKELLGITIMERSSFEKNPIDFLEAKGYKEVKKDLIIKLPKYSLFELENGRKRMLASARELQKGNELALPSKYVNFLYLASHYEKLKGSPEDNEQKQLFVEQHKHYLDEIIEQISEFSKRVILADANLDKVLSAYNKHRDKPIREQAENIIHLFTLTNLGAPAAFKYFDTTIDRKQYRSTKEVLDATLIHQSITGLYETRIDLSQLGGDEGADKRTADGSEFESPKKKRKV

SEQ ID NO: 343 - protein, 1588 aa, Artificial Sequence
  Description of artificial sequence: 03. monoABE8.1_bpNLS + Q154S polypeptide sequence
MSEVEFSHEYWMRHALTLAKRARDEREVPVGAVLVLNNRVIGEGWNRAIGLHDPTAHAEIMALRQGGLVMQNYRLIDATLYVTFEPCVMCAGAMIHSRIGRVVFGVRNAKTGAAGSLMDVLHYPGMNHRVEITEGILADECAALLCYFFRMPRSVFNAQKKAQSSTDSGGSSGGSSGSETPGTSESATPESSGGSSGGSDKKYSIGLAIGTNSVGWAVITDEYKVPSKKFKVLGNTDRHSIKKNLIGALLFDSGETAEATRLKRTARRRYTRRKNRICYLQEIFSNEMAKVDDSFFHRLEESFLVEEDKKHERHPIFGNIVDEVAYHEKYPTIYHLRKKLVDSTDKADLRLIYLALAHMIKFRGHFLIEGDLNPDNSDVDKLFIQLVQTYNQLFEENPINASGVDAKAILSARLSKSRRLENLIAQLPGEKKNGLFGNLIALSLGLTPNFKSNFDLAEDAKLQLSKDTYDDDLDNLLAQIGDQYADLFLAAKNLSDAILLSDILRVNTEITKAPLSASMIKRYDEHHQDLTLLKALVRQQLPEKYKEIFFDQSKNGYAGYIDGGASQEEFYKFIKPILEKMDGTEELLVKLNREDLLRKQRTFDNGSIPHQIHLGELHAILRRQEDFYPFLKDNREKIEKILTFRIPYYVGPLARGNSRFAWMTRKSEETITPWNFEEVVDKGASAQSFIERMTNFDKNLPNEKVLPKHSLLYEYFTVYNELTKVKYVTEGMRKPAFLSGEQKKAIVDLLFKTNRKVTVKQLKEDYFKKIECFDSVEISGVEDRFNASLGTYHDLLKIIKDKDFLDNEENEDILEDIVLTLTLFEDREMIEERLKTYAHLFDDKVMKQLKRRRYTGWGRLSRKLINGIRDKQSGKTILDFLKSDGFANRNFMQLIHDDSLTFKEDIQKAQVSGQGDSLHEHIANLAGSPAIKKGILQTVKVVDELVKVMGRHKPENIVIEMARENQTTQKGQKNSRERMKRIEEGIKELGSQILKEHPVENTQLQNEKLYLYYLQNGRDMYVDQELDINRLSDYDVDHIVPQSFLKDDSIDNKVLTRSDKNRGKSDNVPSEEVVKKMKNYWRQLLNAKLITQRKFDNLTKAERGGLSELDKAGFIKRQLVETRQITKHVAQILDSRMNTKYDENDKLIREVKVITLKSKLVSDFRKDFQFYKVREINNYHHAHDAYLNAVVGTALIKKYPKLESEFVYGDYKVYDVRKMIAKSEQEIGKATAKYFFYSNIMNFFKTEITLANGEIRKRPLIETNGETGEIVWDKGRDFATVRKVLSMPQVNIVKKTEVQTGGFSKESILPKRNSDKLIARKKDWDPKKYGGFVSPTVAYSVLVVAKVEKGKSKKLKSVKELLGITIMERSSFEKNPIDFLEAKGYKEVKKDLIIKLPKYSLFELENGRKRMLASARELQKGNELALPSKYVNFLYLASHYEKLKGSPEDNEQKQLFVEQHKHYLDEIIEQISEFSKRVILADANLDKVLSAYNKHRDKPIREQAENIIHLFTLTNLGAPAAFKYFDTTIDRKQYRSTKEVLDATLIHQSITGLYETRIDLSQLGGDEGADKRTADGSEFESPKKKRKV

SEQ ID NO: 344 - protein, 1588 aa, Artificial Sequence
  Description of artificial sequence: 04. monoABE8.1_bpNLS + Y123H polypeptide sequence
MSEVEFSHEYWMRHALTLAKRARDEREVPVGAVLVLNNRVIGEGWNRAIGLHDPTAHAEIMALRQGGLVMQNYRLIDATLYVTFEPCVMCAGAMIHSRIGRVVFGVRNAKTGAAGSLMDVLHHPGMNHRVEITEGILADECAALLCYFFRMPRQVFNAQKKAQSSTDSGGSSGGSSGSETPGTSESATPESSGGSSGGSDKKYSIGLAIGTNSVGWAVITDEYKVPSKKFKVLGNTDRHSIKKNLIGALLFDSGETAEATRLKRTARRRYTRRKNRICYLQEIFSNEMAKVDDSFFHRLEESFLVEEDKKHERHPIFGNIVDEVAYHEKYPTIYHLRKKLVDSTDKADLRLIYLALAHMIKFRGHFLIEGDLNPDNSDVDKLFIQLVQTYNQLFEENPINASGVDAKAILSARLSKSRRLENLIAQLPGEKKNGLFGNLIALSLGLTPNFKSNFDLAEDAKLQLSKDTYDDDLDNLLAQIGDQYADLFLAAKNLSDAILLSDILRVNTEITKAPLSASMIKRYDEHHQDLTLLKALVRQQLPEKYKEIFFDQSKNGYAGYIDGGASQEEFYKFIKPILEKMDGTEELLVKLNREDLLRKQRTFDNGSIPHQIHLGELHAILRRQEDFYPFLKDNREKIEKILTFRIPYYVGPLARGNSRFAWMTRKSEETITPWNFEEVVDKGASAQSFIERMTNFDKNLPNEKVLPKHSLLYEYFTVYNELTKVKYVTEGMRKPAFLSGEQKKAIVDLLFKTNRKVTVKQLKEDYFKKIECFDSVEISGVEDRFNASLGTYHDLLKIIKDKDFLDNEENEDILEDIVLTLTLFEDREMIEERLKTYAHLFDDKVMKQLKRRRYTGWGRLSRKLINGIRDKQSGKTILDFLKSDGFANRNFMQLIHDDSLTFKEDIQKAQVSGQGDSLHEHIANLAGSPAIKKGILQTVKVVDELVKVMGRHKPENIVIEMARENQTTQKGQKNSRERMKRIEEGIKELGSQILKEHPVENTQLQNEKLYLYYLQNGRDMYVDQELDINRLSDYDVDHIVPQSFLKDDSIDNKVLTRSDKNRGKSDNVPSEEVVKKMKNYWRQLLNAKLITQRKFDNLTKAERGGLSELDKAGFIKRQLVETRQITKHVAQILDSRMNTKYDENDKLIREVKVITLKSKLVSDFRKDFQFYKVREINNYHHAHDAYLNAVVGTALIKKYPKLESEFVYGDYKVYDVRKMIAKSEQEIGKATAKYFFYSNIMNFFKTEITLANGEIRKRPLIETNGETGEIVWDKGRDFATVRKVLSMPQVNIVKKTEVQTGGFSKESILPKRNSDKLIARKKDWDPKKYGGFVSPTVAYSVLVVAKVEKGKSKKLKSVKELLGITIMERSSFEKNPIDFLEAKGYKEVKKDLIIKLPKYSLFELENGRKRMLASARELQKGNELALPSKYVNFLYLASHYEKLKGSPEDNEQKQLFVEQHKHYLDEIIEQISEFSKRVILADANLDKVLSAYNKHRDKPIREQAENIIHLFTLTNLGAPAAFKYFDTTIDRKQYRSTKEVLDATLIHQSITGLYETRIDLSQLGGDEGADKRTADGSEFESPKKKRKV

SEQ ID NO: 345 - protein, 1588 aa, Artificial Sequence
  Description of artificial sequence: 05. monoABE8.1_bpNLS + V82S polypeptide sequence
MSEVEFSHEYWMRHALTLAKRARDEREVPVGAVLVLNNRVIGEGWNRAIGLHDPTAHAEIMALRQGGLVMQNYRLIDATLYSTFEPCVMCAGAMIHSRIGRVVFGVRNAKTGAAGSLMDVLHYPGMNHRVEITEGILADECAALLCYFFRMPRQVFNAQKKAQSSTDSGGSSGGSSGSETPGTSESATPESSGGSSGGSDKKYSIGLAIGTNSVGWAVITDEYKVPSKKFKVLGNTDRHSIKKNLIGALLFDSGETAEATRLKRTARRRYTRRKNRICYLQEIFSNEMAKVDDSFFHRLEESFLVEEDKKHERHPIFGNIVDEVAYHEKYPTIYHLRKKLVDSTDKADLRLIYLALAHMIKFRGHFLIEGDLNPDNSDVDKLFIQLVQTYNQLFEENPINASGVDAKAILSARLSKSRRLENLIAQLPGEKKNGLFGNLIALSLGLTPNFKSNFDLAEDAKLQLSKDTYDDDLDNLLAQIGDQYADLFLAAKNLSDAILLSDILRVNTEITKAPLSASMIKRYDEHHQDLTLLKALVRQQLPEKYKEIFFDQSKNGYAGYIDGGASQEEFYKFIKPILEKMDGTEELLVKLNREDLLRKQRTFDNGSIPHQIHLGELHAILRRQEDFYPFLKDNREKIEKILTFRIPYYVGPLARGNSRFAWMTRKSEETITPWNFEEVVDKGASAQSFIERMTNFDKNLPNEKVLPKHSLLYEYFTVYNELTKVKYVTEGMRKPAFLSGEQKKAIVDLLFKTNRKVTVKQLKEDYFKKIECFDSVEISGVEDRFNASLGTYHDLLKIIKDKDFLDNEENEDILEDIVLTLTLFEDREMIEERLKTYAHLFDDKVMKQLKRRRYTGWGRLSRKLINGIRDKQSGKTILDFLKSDGFANRNFMQLIHDDSLTFKEDIQKAQVSGQGDSLHEHIANLAGSPAIKKGILQTVKVVDELVKVMGRHKPENIVIEMARENQTTQKGQKNSRERMKRIEEGIKELGSQILKEHPVENTQLQNEKLYLYYLQNGRDMYVDQELDINRLSDYDVDHIVPQSFLKDDSIDNKVLTRSDKNRGKSDNVPSEEVVKKMKNYWRQLLNAKLITQRKFDNLTKAERGGLSELDKAGFIKRQLVETRQITKHVAQILDSRMNTKYDENDKLIREVKVITLKSKLVSDFRKDFQFYKVREINNYHHAHDAYLNAVVGTALIKKYPKLESEFVYGDYKVYDVRKMIAKSEQEIGKATAKYFFYSNIMNFFKTEITLANGEIRKRPLIETNGETGEIVWDKGRDFATVRKVLSMPQVNIVKKTEVQTGGFSKESILPKRNSDKLIARKKDWDPKKYGGFVSPTVAYSVLVVAKVEKGKSKKLKSVKELLGITIMERSSFEKNPIDFLEAKGYKEVKKDLIIKLPKYSLFELENGRKRMLASARELQKGNELALPSKYVNFLYLASHYEKLKGSPEDNEQKQLFVEQHKHYLDEIIEQISEFSKRVILADANLDKVLSAYNKHRDKPIREQAENIIHLFTLTNLGAPAAFKYFDTTIDRKQYRSTKEVLDATLIHQSITGLYETRIDLSQLGGDEGADKRTADGSEFESPKKKRKV

SEQ ID NO: 346 - protein, 1588 aa, Artificial Sequence
  Description of artificial sequence: 06. monoABE8.1_bpNLS + T166R polypeptide sequence
MSEVEFSHEYWMRHALTLAKRARDEREVPVGAVLVLNNRVIGEGWNRAIGLHDPTAHAEIMALRQGGLVMQNYRLIDATLYVTFEPCVMCAGAMIHSRIGRVVFGVRNAKTGAAGSLMDVLHYPGMNHRVEITEGILADECAALLCYFFRMPRQVFNAQKKAQSSRDSGGSSGGSSGSETPGTSESATPESSGGSSGGSDKKYSIGLAIGTNSVGWAVITDEYKVPSKKFKVLGNTDRHSIKKNLIGALLFDSGETAEATRLKRTARRRYTRRKNRICYLQEIFSNEMAKVDDSFFHRLEESFLVEEDKKHERHPIFGNIVDEVAYHEKYPTIYHLRKKLVDSTDKADLRLIYLALAHMIKFRGHFLIEGDLNPDNSDVDKLFIQLVQTYNQLFEENPINASGVDAKAILSARLSKSRRLENLIAQLPGEKKNGLFGNLIALSLGLTPNFKSNFDLAEDAKLQLSKDTYDDDLDNLLAQIGDQYADLFLAAKNLSDAILLSDILRVNTEITKAPLSASMIKRYDEHHQDLTLLKALVRQQLPEKYKEIFFDQSKNGYAGYIDGGASQEEFYKFIKPILEKMDGTEELLVKLNREDLLRKQRTFDNGSIPHQIHLGELHAILRRQEDFYPFLKDNREKIEKILTFRIPYYVGPLARGNSRFAWMTRKSEETITPWNFEEVVDKGASAQSFIERMTNFDKNLPNEKVLPKHSLLYEYFTVYNELTKVKYVTEGMRKPAFLSGEQKKAIVDLLFKTNRKVTVKQLKEDYFKKIECFDSVEISGVEDRFNASLGTYHDLLKIIKDKDFLDNEENEDILEDIVLTLTLFEDREMIEERLKTYAHLFDDKVMKQLKRRRYTGWGRLSRKLINGIRDKQSGKTILDFLKSDGFANRNFMQLIHDDSLTFKEDIQKAQVSGQGDSLHEHIANLAGSPAIKKGILQTVKVVDELVKVMGRHKPENIVIEMARENQTTQKGQKNSRERMKRIEEGIKELGSQILKEHPVENTQLQNEKLYLYYLQNGRDMYVDQELDINRLSDYDVDHIVPQSFLKDDSIDNKVLTRSDKNRGKSDNVPSEEVVKKMKNYWRQLLNAKLITQRKFDNLTKAERGGLSELDKAGFIKRQLVETRQITKHVAQILDSRMNTKYDENDKLIREVKVITLKSKLVSDFRKDFQFYKVREINNYHHAHDAYLNAVVGTALIKKYPKLESEFVYGDYKVYDVRKMIAKSEQEIGKATAKYFFYSNIMNFFKTEITLANGEIRKRPLIETNGETGEIVWDKGRDFATVRKVLSMPQVNIVKKTEVQTGGFSKESILPKRNSDKLIARKKDWDPKKYGGFVSPTVAYSVLVVAKVEKGKSKKLKSVKELLGITIMERSSFEKNPIDFLEAKGYKEVKKDLIIKLPKYSLFELENGRKRMLASARELQKGNELALPSKYVNFLYLASHYEKLKGSPEDNEQKQLFVEQHKHYLDEIIEQISEFSKRVILADANLDKVLSAYNKHRDKPIREQAENIIHLFTLTNLGAPAAFKYFDTTIDRKQYRSTKEVLDATLIHQSITGLYETRIDLSQLGGDEGADKRTADGSEFESPKKKRKV

SEQ ID NO: 347 - protein, 1588 aa, Artificial Sequence
  Description of artificial sequence: 07. monoABE8.1_bpNLS + Q154R polypeptide sequence
MSEVEFSHEYWMRHALTLAKRARDEREVPVGAVLVLNNRVIGEGWNRAIGLHDPTAHAEIMALRQGGLVMQNYRLIDATLYVTFEPCVMCAGAMIHSRIGRVVFGVRNAKTGAAGSLMDVLHYPGMNHRVEITEGILADECAALLCYFFRMPRRVFNAQKKAQSSTDSGGSSGGSSGSETPGTSESATPESSGGSSGGSDKKYSIGLAIGTNSVGWAVITDEYKVPSKKFKVLGNTDRHSIKKNLIGALLFDSGETAEATRLKRTARRRYTRRKNRICYLQEIFSNEMAKVDDSFFHRLEESFLVEEDKKHERHPIFGNIVDEVAYHEKYPTIYHLRKKLVDSTDKADLRLIYLALAHMIKFRGHFLIEGDLNPDNSDVDKLFIQLVQTYNQLFEENPINASGVDAKAILSARLSKSRRLENLIAQLPGEKKNGLFGNLIALSLGLTPNFKSNFDLAEDAKLQLSKDTYDDDLDNLLAQIGDQYADLFLAAKNLSDAILLSDILRVNTEITKAPLSASMIKRYDEHHQDLTLLKALVRQQLPEKYKEIFFDQSKNGYAGYIDGGASQEEFYKFIKPILEKMDGTEELLVKLNREDLLRKQRTFDNGSIPHQIHLGELHAILRRQEDFYPFLKDNREKIEKILTFRIPYYVGPLARGNSRFAWMTRKSEETITPWNFEEVVDKGASAQSFIERMTNFDKNLPNEKVLPKHSLLYEYFTVYNELTKVKYVTEGMRKPAFLSGEQKKAIVDLLFKTNRKVTVKQLKEDYFKKIECFDSVEISGVEDRFNASLGTYHDLLKIIKDKDFLDNEENEDILEDIVLTLTLFEDREMIEERLKTYAHLFDDKVMKQLKRRRYTGWGRLSRKLINGIRDKQSGKTILDFLKSDGFANRNFMQLIHDDSLTFKEDIQKAQVSGQGDSLHEHIANLAGSPAIKKGILQTVKVVDELVKVMGRHKPENIVIEMARENQTTQKGQKNSRERMKRIEEGIKELGSQILKEHPVENTQLQNEKLYLYYLQNGRDMYVDQELDINRLSDYDVDHIVPQSFLKDDSIDNKVLTRSDKNRGKSDNVPSEEVVKKMKNYWRQLLNAKLITQRKFDNLTKAERGGLSELDKAGFIKRQLVETRQITKHVAQILDSRMNTKYDENDKLIREVKVITLKSKLVSDFRKDFQFYKVREINNYHHAHDAYLNAVVGTALIKKYPKLESEFVYGDYKVYDVRKMIAKSEQEIGKATAKYFFYSNIMNFFKTEITLANGEIRKRPLIETNGETGEIVWDKGRDFATVRKVLSMPQVNIVKKTEVQTGGFSKESILPKRNSDKLIARKKDWDPKKYGGFVSPTVAYSVLVVAKVEKGKSKKLKSVKELLGITIMERSSFEKNPIDFLEAKGYKEVKKDLIIKLPKYSLFELENGRKRMLASARELQKGNELALPSKYVNFLYLASHYEKLKGSPEDNEQKQLFVEQHKHYLDEIIEQISEFSKRVILADANLDKVLSAYNKHRDKPIREQAENIIHLFTLTNLGAPAAFKYFDTTIDRKQYRSTKEVLDATLIHQSITGLYETRIDLSQLGGDEGADKRTADGSEFESPKKKRKV

SEQ ID NO: 348 - protein, 1588 aa, Artificial Sequence
  Description of artificial sequence: 08. monoABE8.1_bpNLS + Y147R_Q154R_Y123H polypeptide sequence
MSEVEFSHEYWMRHALTLAKRARDEREVPVGAVLVLNNRVIGEGWNRAIGLHDPTAHAEIMALRQGGLVMQNYRLIDATLYVTFEPCVMCAGAMIHSRIGRVVFGVRNAKTGAAGSLMDVLHHPGMNHRVEITEGILADECAALLCRFFRMPRRVFNAQKKAQSSTDSGGSSGGSSGSETPGTSESATPESSGGSSGGSDKKYSIGLAIGTNSVGWAVITDEYKVPSKKFKVLGNTDRHSIKKNLIGALLFDSGETAEATRLKRTARRRYTRRKNRICYLQEIFSNEMAKVDDSFFHRLEESFLVEEDKKHERHPIFGNIVDEVAYHEKYPTIYHLRKKLVDSTDKADLRLIYLALAHMIKFRGHFLIEGDLNPDNSDVDKLFIQLVQTYNQLFEENPINASGVDAKAILSARLSKSRRLENLIAQLPGEKKNGLFGNLIALSLGLTPNFKSNFDLAEDAKLQLSKDTYDDDLDNLLAQIGDQYADLFLAAKNLSDAILLSDILRVNTEITKAPLSASMIKRYDEHHQDLTLLKALVRQQLPEKYKEIFFDQSKNGYAGYIDGGASQEEFYKFIKPILEKMDGTEELLVKLNREDLLRKQRTFDNGSIPHQIHLGELHAILRRQEDFYPFLKDNREKIEKILTFRIPYYVGPLARGNSRFAWMTRKSEETITPWNFEEVVDKGASAQSFIERMTNFDKNLPNEKVLPKHSLLYEYFTVYNELTKVKYVTEGMRKPAFLSGEQKKAIVDLLFKTNRKVTVKQLKEDYFKKIECFDSVEISGVEDRFNASLGTYHDLLKIIKDKDFLDNEENEDILEDIVLTLTLFEDREMIEERLKTYAHLFDDKVMKQLKRRRYTGWGRLSRKLINGIRDKQSGKTILDFLKSDGFANRNFMQLIHDDSLTFKEDIQKAQVSGQGDSLHEHIANLAGSPAIKKGILQTVKVVDELVKVMGRHKPENIVIEMARENQTTQKGQKNSRERMKRIEEGIKELGSQILKEHPVENTQLQNEKLYLYYLQNGRDMYVDQELDINRLSDYDVDHIVPQSFLKDDSIDNKVLTRSDKNRGKSDNVPSEEVVKKMKNYWRQLLNAKLITQRKFDNLTKAERGGLSELDKAGFIKRQLVETRQITKHVAQILDSRMNTKYDENDKLIREVKVITLKSKLVSDFRKDFQFYKVREINNYHHAHDAYLNAVVGTALIKKYPKLESEFVYGDYKVYDVRKMIAKSEQEIGKATAKYFFYSNIMNFFKTEITLANGEIRKRPLIETNGETGEIVWDKGRDFATVRKVLSMPQVNIVKKTEVQTGGFSKESILPKRNSDKLIARKKDWDPKKYGGFVSPTVAYSVLVVAKVEKGKSKKLKSVKELLGITIMERSSFEKNPIDFLEAKGYKEVKKDLIIKLPKYSLFELENGRKRMLASARELQKGNELALPSKYVNFLYLASHYEKLKGSPEDNEQKQLFVEQHKHYLDEIIEQISEFSKRVILADANLDKVLSAYNKHRDKPIREQAENIIHLFTLTNLGAPAAFKYFDTTIDRKQYRSTKEVLDATLIHQSITGLYETRIDLSQLGGDEGADKRTADGSEFESPKKKRKV

SEQ ID NO: 349 - protein, 1588 aa, Artificial Sequence
  Description of artificial sequence: 09. monoABE8.1_bpNLS + Y147R_Q154R_I76Y polypeptide sequence
MSEVEFSHEYWMRHALTLAKRARDEREVPVGAVLVLNNRVIGEGWNRAIGLHDPTAHAEIMALRQGGLVMQNYRLYDATLYVTFEPCVMCAGAMIHSRIGRVVFGVRNAKTGAAGSLMDVLHYPGMNHRVEITEGILADECAALLCRFFRMPRRVFNAQKKAQSSTDSGGSSGGSSGSETPGTSESATPESSGGSSGGSDKKYSIGLAIGTNSVGWAVITDEYKVPSKKFKVLGNTDRHSIKKNLIGALLFDSGETAEATRLKRTARRRYTRRKNRICYLQEIFSNEMAKVDDSFFHRLEESFLVEEDKKHERHPIFGNIVDEVAYHEKYPTIYHLRKKLVDSTDKADLRLIYLALAHMIKFRGHFLIEGDLNPDNSDVDKLFIQLVQTYNQLFEENPINASGVDAKAILSARLSKSRRLENLIAQLPGEKKNGLFGNLIALSLGLTPNFKSNFDLAEDAKLQLSKDTYDDDLDNLLAQIGDQYADLFLAAKNLSDAILLSDILRVNTEITKAPLSASMIKRYDEHHQDLTLLKALVRQQLPEKYKEIFFDQSKNGYAGYIDGGASQEEFYKFIKPILEKMDGTEELLVKLNREDLLRKQRTFDNGSIPHQIHLGELHAILRRQEDFYPFLKDNREKIEKILTFRIPYYVGPLARGNSRFAWMTRKSEETITPWNFEEVVDKGASAQSFIERMTNFDKNLPNEKVLPKHSLLYEYFTVYNELTKVKYVTEGMRKPAFLSGEQKKAIVDLLFKTNRKVTVKQLKEDYFKKIECFDSVEISGVEDRFNASLGTYHDLLKIIKDKDFLDNEENEDILEDIVLTLTLFEDREMIEERLKTYAHLFDDKVMKQLKRRRYTGWGRLSRKLINGIRDKQSGKTILDFLKSDGFANRNFMQLIHDDSLTFKEDIQKAQVSGQGDSLHEHIANLAGSPAIKKGILQTVKVVDELVKVMGRHKPENIVIEMARENQTTQKGQKNSRERMKRIEEGIKELGSQILKEHPVENTQLQNEKLYLYYLQNGRDMYVDQELDINRLSDYDVDHIVPQSFLKDDSIDNKVLTRSDKNRGKSDNVPSEEVVKKMKNYWRQLLNAKLITQRKFDNLTKAERGGLSELDKAGFIKRQLVETRQITKHVAQILDSRMNTKYDENDKLIREVKVITLKSKLVSDFRKDFQFYKVREINNYHHAHDAYLNAVVGTALIKKYPKLESEFVYGDYKVYDVRKMIAKSEQEIGKATAKYFFYSNIMNFFKTEITLANGEIRKRPLIETNGETGEIVWDKGRDFATVRKVLSMPQVNIVKKTEVQTGGFSKESILPKRNSDKLIARKKDWDPKKYGGFVSPTVAYSVLVVAKVEKGKSKKLKSVKELLGITIMERSSFEKNPIDFLEAKGYKEVKKDLIIKLPKYSLFELENGRKRMLASARELQKGNELALPSKYVNFLYLASHYEKLKGSPEDNEQKQLFVEQHKHYLDEIIEQISEFSKRVILADANLDKVLSAYNKHRDKPIREQAENIIHLFTLTNLGAPAAFKYFDTTIDRKQYRSTKEVLDATLIHQSITGLYETRIDLSQLGGDEGADKRTADGSEFESPKKKRKV

SEQ ID NO: 350 - protein, 1588 aa, Artificial Sequence
  Description of artificial sequence: 10. monoABE8.1_bpNLS + Y147R_Q154R_T166R polypeptide sequence
MSEVEFSHEYWMRHALTLAKRARDEREVPVGAVLVLNNRVIGEGWNRAIGLHDPTAHAEIMALRQGGLVMQNYRLIDATLYVTFEPCVMCAGAMIHSRIGRVVFGVRNAKTGAAGSLMDVLHYPGMNHRVEITEGILADECAALLCRFFRMPRRVFNAQKKAQSSRDSGGSSGGSSGSETPGTSESATPESSGGSSGGSDKKYSIGLAIGTNSVGWAVITDEYKVPSKKFKVLGNTDRHSIKKNLIGALLFDSGETAEATRLKRTARRRYTRRKNRICYLQEIFSNEMAKVDDSFFHRLEESFLVEEDKKHERHPIFGNIVDEVAYHEKYPTIYHLRKKLVDSTDKADLRLIYLALAHMIKFRGHFLIEGDLNPDNSDVDKLFIQLVQTYNQLFEENPINASGVDAKAILSARLSKSRRLENLIAQLPGEKKNGLFGNLIALSLGLTPNFKSNFDLAEDAKLQLSKDTYDDDLDNLLAQIGDQYADLFLAAKNLSDAILLSDILRVNTEITKAPLSASMIKRYDEHHQDLTLLKALVRQQLPEKYKEIFFDQSKNGYAGYIDGGASQEEFYKFIKPILEKMDGTEELLVKLNREDLLRKQRTFDNGSIPHQIHLGELHAILRRQEDFYPFLKDNREKIEKILTFRIPYYVGPLARGNSRFAWMTRKSEETITPWNFEEVVDKGASAQSFIERMTNFDKNLPNEKVLPKHSLLYEYFTVYNELTKVKYVTEGMRKPAFLSGEQKKAIVDLLFKTNRKVTVKQLKEDYFKKIECFDSVEISGVEDRFNASLGTYHDLLKIIKDKDFLDNEENEDILEDIVLTLTLFEDREMIEERLKTYAHLFDDKVMKQLKRRRYTGWGRLSRKLINGIRDKQSGKTILDFLKSDGFANRNFMQLIHDDSLTFKEDIQKAQVSGQGDSLHEHIANLAGSPAIKKGILQTVKVVDELVKVMGRHKPENIVIEMARENQTTQKGQKNSRERMKRIEEGIKELGSQILKEHPVENTQLQNEKLYLYYLQNGRDMYVDQELDINRLSDYDVDHIVPQSFLKDDSIDNKVLTRSDKNRGKSDNVPSEEVVKKMKNYWRQLLNAKLITQRKFDNLTKAERGGLSELDKAGFIKRQLVETRQITKHVAQILDSRMNTKYDENDKLIREVKVITLKSKLVSDFRKDFQFYKVREINNYHHAHDAYLNAVVGTALIKKYPKLESEFVYGDYKVYDVRKMIAKSEQEIGKATAKYFFYSNIMNFFKTEITLANGEIRKRPLIETNGETGEIVWDKGRDFATVRKVLSMPQVNIVKKTEVQTGGFSKESILPKRNSDKLIARKKDWDPKKYGGFVSPTVAYSVLVVAKVEKGKSKKLKSVKELLGITIMERSSFEKNPIDFLEAKGYKEVKKDLIIKLPKYSLFELENGRKRMLASARELQKGNELALPSKYVNFLYLASHYEKLKGSPEDNEQKQLFVEQHKHYLDEIIEQISEFSKRVILADANLDKVLSAYNKHRDKPIREQAENIIHLFTLTNLGAPAAFKYFDTTIDRKQYRSTKEVLDATLIHQSITGLYETRIDLSQLGGDEGADKRTADGSEFESPKKKRKV

SEQ ID NO: 351 - protein, 1588 aa, Artificial Sequence
  Description of artificial sequence: 11. monoABE8.1_bpNLS + Y147T_Q154R polypeptide sequence
MSEVEFSHEYWMRHALTLAKRARDEREVPVGAVLVLNNRVIGEGWNRAIGLHDPTAHAEIMALRQGGLVMQNYRLIDATLYVTFEPCVMCAGAMIHSRIGRVVFGVRNAKTGAAGSLMDVLHYPGMNHRVEITEGILADECAALLCTFFRMPRRVFNAQKKAQSSTDSGGSSGGSSGSETPGTSESATPESSGGSSGGSDKKYSIGLAIGTNSVGWAVITDEYKVPSKKFKVLGNTDRHSIKKNLIGALLFDSGETAEATRLKRTARRRYTRRKNRICYLQEIFSNEMAKVDDSFFHRLEESFLVEEDKKHERHPIFGNIVDEVAYHEKYPTIYHLRKKLVDSTDKADLRLIYLALAHMIKFRGHFLIEGDLNPDNSDVDKLFIQLVQTYNQLFEENPINASGVDAKAILSARLSKSRRLENLIAQLPGEKKNGLFGNLIALSLGLTPNFKSNFDLAEDAKLQLSKDTYDDDLDNLLAQIGDQYADLFLAAKNLSDAILLSDILRVNTEITKAPLSASMIKRYDEHHQDLTLLKALVRQQLPEKYKEIFFDQSKNGYAGYIDGGASQEEFYKFIKPILEKMDGTEELLVKLNREDLLRKQRTFDNGSIPHQIHLGELHAILRRQEDFYPFLKDNREKIEKILTFRIPYYVGPLARGNSRFAWMTRKSEETITPWNFEEVVDKGASAQSFIERMTNFDKNLPNEKVLPKHSLLYEYFTVYNELTKVKYVTEGMRKPAFLSGEQKKAIVDLLFKTNRKVTVKQLKEDYFKKIECFDSVEISGVEDRFNASLGTYHDLLKIIKDKDFLDNEENEDILEDIVLTLTLFEDREMIEERLKTYAHLFDDKVMKQLKRRRYTGWGRLSRKLINGIRDKQSGKTILDFLKSDGFANRNFMQLIHDDSLTFKEDIQKAQVSGQGDSLHEHIANLAGSPAIKKGILQTVKVVDELVKVMGRHKPENIVIEMARENQTTQKGQKNSRERMKRIEEGIKELGSQILKEHPVENTQLQNEKLYLYYLQNGRDMYVDQELDINRLSDYDVDHIVPQSFLKDDSIDNKVLTRSDKNRGKSDNVPSEEVVKKMKNYWRQLLNAKLITQRKFDNLTKAERGGLSELDKAGFIKRQLVETRQITKHVAQILDSRMNTKYDENDKLIREVKVITLKSKLVSDFRKDFQFYKVREINNYHHAHDAYLNAVVGTALIKKYPKLESEFVYGDYKVYDVRKMIAKSEQEIGKATAKYFFYSNIMNFFKTEITLANGEIRKRPLIETNGETGEIVWDKGRDFATVRKVLSMPQVNIVKKTEVQTGGFSKESILPKRNSDKLIARKKDWDPKKYGGFVSPTVAYSVLVVAKVEKGKSKKLKSVKELLGITIMERSSFEKNPIDFLEAKGYKEVKKDLIIKLPKYSLFELENGRKRMLASARELQKGNELALPSKYVNFLYLASHYEKLKGSPEDNEQKQLFVEQHKHYLDEIIEQISEFSKRVILADANLDKVLSAYNKHRDKPIREQAENIIHLFTLTNLGAPAAFKYFDTTIDRKQYRSTKEVLDATLIHQSITGLYETRIDLSQLGGDEGADKRTADGSEFESPKKKRKV

SEQ ID NO: 352 - protein, 1588 aa, Artificial Sequence
  Description of artificial sequence: 12. monoABE8.1_bpNLS + Y147T_Q154S polypeptide sequence
MSEVEFSHEYWMRHALTLAKRARDEREVPVGAVLVLNNRVIGEGWNRAIGLHDPTAHAEIMALRQGGLVMQNYRLIDATLYVTFEPCVMCAGAMIHSRIGRVVFGVRNAKTGAAGSLMDVLHYPGMNHRVEITEGILADECAALLCTFFRMPRSVFNAQKKAQSSTDSGGSSGGSSGSETPGTSESATPESSGGSSGGSDKKYSIGLAIGTNSVGWAVITDEYKVPSKKFKVLGNTDRHSIKKNLIGALLFDSGETAEATRLKRTARRRYTRRKNRICYLQEIFSNEMAKVDDSFFHRLEESFLVEEDKKHERHPIFGNIVDEVAYHEKYPTIYHLRKKLVDSTDKADLRLIYLALAHMIKFRGHFLIEGDLNPDNSDVDKLFIQLVQTYNQLFEENPINASGVDAKAILSARLSKSRRLENLIAQLPGEKKNGLFGNLIALSLGLTPNFKSNFDLAEDAKLQLSKDTYDDDLDNLLAQIGDQYADLFLAAKNLSDAILLSDILRVNTEITKAPLSASMIKRYDEHHQDLTLLKALVRQQLPEKYKEIFFDQSKNGYAGYIDGGASQEEFYKFIKPILEKMDGTEELLVKLNREDLLRKQRTFDNGSIPHQIHLGELHAILRRQEDFYPFLKDNREKIEKILTFRIPYYVGPLARGNSRFAWMTRKSEETITPWNFEEVVDKGASAQSFIERMTNFDKNLPNEKVLPKHSLLYEYFTVYNELTKVKYVTEGMRKPAFLSGEQKKAIVDLLFKTNRKVTVKQLKEDYFKKIECFDSVEISGVEDRFNASLGTYHDLLKIIKDKDFLDNEENEDILEDIVLTLTLFEDREMIEERLKTYAHLFDDKVMKQLKRRRYTGWGRLSRKLINGIRDKQSGKTILDFLKSDGFANRNFMQLIHDDSLTFKEDIQKAQVSGQGDSLHEHIANLAGSPAIKKGILQTVKVVDELVKVMGRHKPENIVIEMARENQTTQKGQKNSRERMKRIEEGIKELGSQILKEHPVENTQLQNEKLYLYYLQNGRDMYVDQELDINRLSDYDVDHIVPQSFLKDDSIDNKVLTRSDKNRGKSDNVPSEEVVKKMKNYWRQLLNAKLITQRKFDNLTKAERGGLSELDKAGFIKRQLVETRQITKHVAQILDSRMNTKYDENDKLIREVKVITLKSKLVSDFRKDFQFYKVREINNYHHAHDAYLNAVVGTALIKKYPKLESEFVYGDYKVYDVRKMIAKSEQEIGKATAKYFFYSNIMNFFKTEITLANGEIRKRPLIETNGETGEIVWDKGRDFATVRKVLSMPQVNIVKKTEVQTGGFSKESILPKRNSDKLIARKKDWDPKKYGGFVSPTVAYSVLVVAKVEKGKSKKLKSVKELLGITIMERSSFEKNPIDFLEAKGYKEVKKDLIIKLPKYSLFELENGRKRMLASARELQKGNELALPSKYVNFLYLASHYEKLKGSPEDNEQKQLFVEQHKHYLDEIIEQISEFSKRVILADANLDKVLSAYNKHRDKPIREQAENIIHLFTLTNLGAPAAFKYFDTTIDRKQYRSTKEVLDATLIHQSITGLYETRIDLSQLGGDEGADKRTADGSEFESPKKKRKV

SEQ ID NO: 353 - protein, 1588 aa, Artificial Sequence
  Description of artificial sequence: 13. monoABE8.1_bpNLS + H123Y123H_Y147R_Q154R_I76Y polypeptide sequence
MSEVEFSHEYWMRHALTLAKRARDEREVPVGAVLVLNNRVIGEGWNRAIGLHDPTAHAEIMALRQGGLVMQNYRLYDATLYVTFEPCVMCAGAMIHSRIGRVVFGVRNAKTGAAGSLMDVLHHPGMNHRVEITEGILADECAALLCRFFRMPRRVFNAQKKAQSSTDSGGSSGGSSGSETPGTSESATPESSGGSSGGSDKKYSIGLAIGTNSVGWAVITDEYKVPSKKFKVLGNTDRHSIKKNLIGALLFDSGETAEATRLKRTARRRYTRRKNRICYLQEIFSNEMAKVDDSFFHRLEESFLVEEDKKHERHPIFGNIVDEVAYHEKYPTIYHLRKKLVDSTDKADLRLIYLALAHMIKFRGHFLIEGDLNPDNSDVDKLFIQLVQTYNQLFEENPINASGVDAKAILSARLSKSRRLENLIAQLPGEKKNGLFGNLIALSLGLTPNFKSNFDLAEDAKLQLSKDTYDDDLDNLLAQIGDQYADLFLAAKNLSDAILLSDILRVNTEITKAPLSASMIKRYDEHHQDLTLLKALVRQQLPEKYKEIFFDQSKNGYAGYIDGGASQEEFYKFIKPILEKMDGTEELLVKLNREDLLRKQRTFDNGSIPHQIHLGELHAILRRQEDFYPFLKDNREKIEKILTFRIPYYVGPLARGNSRFAWMTRKSEETITPWNFEEVVDKGASAQSFIERMTNFDKNLPNEKVLPKHSLLYEYFTVYNELTKVKYVTEGMRKPAFLSGEQKKAIVDLLFKTNRKVTVKQLKEDYFKKIECFDSVEISGVEDRFNASLGTYHDLLKIIKDKDFLDNEENEDILEDIVLTLTLFEDREMIEERLKTYAHLFDDKVMKQLKRRRYTGWGRLSRKLINGIRDKQSGKTILDFLKSDGFANRNFMQLIHDDSLTFKEDIQKAQVSGQGDSLHEHIANLAGSPAIKKGILQTVKVVDELVKVMGRHKPENIVIEMARENQTTQKGQKNSRERMKRIEEGIKELGSQILKEHPVENTQLQNEKLYLYYLQNGRDMYVDQELDINRLSDYDVDHIVPQSFLKDDSIDNKVLTRSDKNRGKSDNVPSEEVVKKMKNYWRQLLNAKLITQRKFDNLTKAERGGLSELDKAGFIKRQLVETRQITKHVAQILDSRMNTKYDENDKLIREVKVITLKSKLVSDFRKDFQFYKVREINNYHHAHDAYLNAVVGTALIKKYPKLESEFVYGDYKVYDVRKMIAKSEQEIGKATAKYFFYSNIMNFFKTEITLANGEIRKRPLIETNGETGEIVWDKGRDFATVRKVLSMPQVNIVKKTEVQTGGFSKESILPKRNSDKLIARKKDWDPKKYGGFVSPTVAYSVLVVAKVEKGKSKKLKSVKELLGITIMERSSFEKNPIDFLEAKGYKEVKKDLIIKLPKYSLFELENGRKRMLASARELQKGNELALPSKYVNFLYLASHYEKLKGSPEDNEQKQLFVEQHKHYLDEIIEQISEFSKRVILADANLDKVLSAYNKHRDKPIREQAENIIHLFTLTNLGAPAAFKYFDTTIDRKQYRSTKEVLDATLIHQSITGLYETRIDLSQLGGDEGADKRTADGSEFESPKKKRKV

SEQ ID NO: 354 - protein, 1588 aa, Artificial Sequence
  Description of artificial sequence: 14. monoABE8.1_bpNLS + V82S + Q154R polypeptide sequence
MSEVEFSHEYWMRHALTLAKRARDEREVPVGAVLVLNNRVIGEGWNRAIGLHDPTAHAEIMALRQGGLVMQNYRLIDATLYSTFEPCVMCAGAMIHSRIGRVVFGVRNAKTGAAGSLMDVLHYPGMNHRVEITEGILADECAALLCYFFRMPRRVFNAQKKAQSSTDSGGSSGGSSGSETPGTSESATPESSGGSSGGSDKKYSIGLAIGTNSVGWAVITDEYKVPSKKFKVLGNTDRHSIKKNLIGALLFDSGETAEATRLKRTARRRYTRRKNRICYLQEIFSNEMAKVDDSFFHRLEESFLVEEDKKHERHPIFGNIVDEVAYHEKYPTIYHLRKKLVDSTDKADLRLIYLALAHMIKFRGHFLIEGDLNPDNSDVDKLFIQLVQTYNQLFEENPINASGVDAKAILSARLSKSRRLENLIAQLPGEKKNGLFGNLIALSLGLTPNFKSNFDLAEDAKLQLSKDTYDDDLDNLLAQIGDQYADLFLAAKNLSDAILLSDILRVNTEITKAPLSASMIKRYDEHHQDLTLLKALVRQQLPEKYKEIFFDQSKNGYAGYIDGGASQEEFYKFIKPILEKMDGTEELLVKLNREDLLRKQRTFDNGSIPHQIHLGELHAILRRQEDFYPFLKDNREKIEKILTFRIPYYVGPLARGNSRFAWMTRKSEETITPWNFEEVVDKGASAQSFIERMTNFDKNLPNEKVLPKHSLLYEYFTVYNELTKVKYVTEGMRKPAFLSGEQKKAIVDLLFKTNRKVTVKQLKEDYFKKIECFDSVEISGVEDRFNASLGTYHDLLKIIKDKDFLDNEENEDILEDIVLTLTLFEDREMIEERLKTYAHLFDDKVMKQLKRRRYTGWGRLSRKLINGIRDKQSGKTILDFLKSDGFANRNFMQLIHDDSLTFKEDIQKAQVSGQGDSLHEHIANLAGSPAIKKGILQTVKVVDELVKVMGRHKPENIVIEMARENQTTQKGQKNSRERMKRIEEGIKELGSQILKEHPVENTQLQNEKLYLYYLQNGRDMYVDQELDINRLSDYDVDHIVPQSFLKDDSIDNKVLTRSDKNRGKSDNVPSEEVVKKMKNYWRQLLNAKLITQRKFDNLTKAERGGLSELDKAGFIKRQLVETRQITKHVAQILDSRMNTKYDENDKLIREVKVITLKSKLVSDFRKDFQFYKVREINNYHHAHDAYLNAVVGTALIKKYPKLESEFVYGDYKVYDVRKMIAKSEQEIGKATAKYFFYSNIMNFFKTEITLANGEIRKRPLIETNGETGEIVWDKGRDFATVRKVLSMPQVNIVKKTEVQTGGFSKESILPKRNSDKLIARKKDWDPKKYGGFVSPTVAYSVLVVAKVEKGKSKKLKSVKELLGITIMERSSFEKNPIDFLEAKGYKEVKKDLIIKLPKYSLFELENGRKRMLASARELQKGNELALPSKYVNFLYLASHYEKLKGSPEDNEQKQLFVEQHKHYLDEIIEQISEFSKRVILADANLDKVLSAYNKHRDKPIREQAENIIHLFTLTNLGAPAAFKYFDTTIDRKQYRSTKEVLDATLIHQSITGLYETRIDLSQLGGDEGADKRTADGSEFESPKKKRKV

SEQ ID NO: 355 - protein, 4 aa, Artificial Sequence
  Description of artificial sequence: synthetic peptide sequence
SGGS

SEQ ID NO: 356 - protein, 24 aa, Artificial Sequence
  Description of artificial sequence: synthetic peptide sequence
SGGSSGSETPGTSESATPESSGGS

SEQ ID NO: 357 - protein, 32 aa, Artificial Sequence
  Description of artificial sequence: synthetic polypeptide sequence
SGGSSGGSSGSETPGTSESATPESSGGSSGGS

SEQ ID NO: 358 - protein, 104 aa, Artificial Sequence
  Description of artificial sequence: synthetic polypeptide sequence
GGSGGSPGSPAGSPTSTEEGTSESATPESGPGTSTEPSEGSAPGSPAGSPTSTEEGTSTEPSEGSAPGTSTEPSEGSAPGTSESATPESGPGSEPATSGGSGGS

SEQ ID NO: 359 - protein, 24 aa, Artificial Sequence
  Description of artificial sequence: synthetic peptide sequence
SGGSSGGSSGSETPGTSESATPES

SEQ ID NO: 360 - protein, 40 aa, Artificial Sequence
  Description of artificial sequence: synthetic polypeptide sequence
SGGSSGGSSGSETPGTSESATPESSGGSSGGSSGGSSGGS

SEQ ID NO: 361 - protein, 64 aa, Artificial Sequence
  Description of artificial sequence: synthetic polypeptide sequence
SGGSSGGSSGSETPGTSESATPESSGGSSGGSSGGSSGGSSGSETPGTSESATPESSGGSSGGS

SEQ ID NO: 362 - protein, 92 aa, Artificial Sequence
  Description of artificial sequence: synthetic polypeptide sequence
PGSPAGSPTSTEEGTSESATPESGPGTSTEPSEGSAPGSPAGSPTSTEEGTSTEPSEGSAPGTSTEPSEGSAPGTSESATPESGPGSEPATS

SEQ ID NO: 363 - protein, 5 aa, Artificial Sequence
  Description of artificial sequence: synthetic peptide sequence
PAPAP

SEQ ID NO: 364 - protein, 6 aa, Artificial Sequence
  Description of artificial sequence: synthetic peptide sequence
PAPAPA

SEQ ID NO: 365 - protein, 7 aa, Artificial Sequence
  Description of artificial sequence: synthetic peptide sequence
PAPAPAP

SEQ ID NO: 366 - protein, 8 aa, Artificial Sequence
  Description of artificial sequence: synthetic peptide sequence
PAPAPAPA

SEQ ID NO: 367 - protein, 9 aa, Artificial Sequence
  Description of artificial sequence: synthetic peptide sequence
PAPAPAPAP

SEQ ID NO: 368 - protein, 15 aa, Artificial Sequence
  Description of artificial sequence: synthetic peptide sequence
PAPAPAPAPAPAPAP

SEQ ID NO: 369 - protein, 21 aa, Artificial Sequence
  Description of artificial sequence: synthetic peptide sequence
PAPAPAPAPAPAPAPAPAPAP

SEQ ID NO: 370 - RNA, 20 nt, Artificial Sequence
  Description of artificial sequence: synthetic oligonucleotide sequence
caguauggacacuguccaaa

SEQ ID NO: 371 - RNA, 20 nt, Artificial Sequence
  Description of artificial sequence: synthetic oligonucleotide sequence
ccaccaguauggacacuguc

SEQ ID NO: 372 - RNA, 20 nt, Artificial Sequence
  Description of artificial sequence: synthetic oligonucleotide sequence
caccaguauggacacugucc

SEQ ID NO: 373 - RNA, 20 nt, Artificial Sequence
  Description of artificial sequence: synthetic oligonucleotide sequence
accaguauggacacugucca

SEQ ID NO: 374 - RNA, 20 nt, Artificial Sequence
  Description of artificial sequence: synthetic oligonucleotide sequence
ccaguauggacacuguccaa

SEQ ID NO: 375 - RNA, 20 nt, Artificial Sequence
  Description of artificial sequence: synthetic oligonucleotide sequence
aguauggacacuguccaaag

SEQ ID NO: 376 - RNA, 20 nt, Artificial Sequence
  Description of artificial sequence: synthetic oligonucleotide sequence
guauggacacuguccaaaga

SEQ ID NO: 377 - RNA, 20 nt, Artificial Sequence
  Description of artificial sequence: synthetic oligonucleotide sequence
uauggacacuguccaaagag

SEQ ID NO: 378 - DNA, 8811 bp, Artificial Sequence
  Description of artificial sequence: synthetic polynucleotide sequence
atatgccaagtacgccccctattgacgtcaatgacggtaaatggcccgcctggcattatgcccagtacatgaccttatgggactttcctacttggcagtacatctacgtattagtcatcgctattaccatggtgatgcggttttggcagtacatcaatgggcgtggatagcggtttgactcacggggatttccaagtctccaccccattgacgtcaatgggagtttgttttggcaccaaaatcaacgggactttccaaaatgtcgtaacaactccgccccattgacgcaaatgggcggtaggcgtgtacggtgggaggtctatataagcagagctggtttagtgaaccgtcagatccgctagagatccgcggccgctaatacgactcactatagggagagccgccaccatgaaacggacagccgacggaagcgagttcgagtcaccaaagaagaagcggaaagtctctgaagtcgagtttagccacgagtattggatgaggcacgcactgaccctggcaaagcgagcatgggatgaaagagaagtccccgtgggcgccgtgctggtgcacaacaatagagtgatcggagagggatggaacaggccaatcggccgccacgaccctaccgcacacgcagagatcatggcactgaggcagggaggcctggtcatgcagaattaccgcctgatcgatgccaccctgtatgtgacactggagccatgcgtgatgtgcgcaggagcaatgatccacagcaggatcggaagagtggtgttcggagcacgggacgccaagaccggcgcagcaggctccctgatggatgtgctgcaccaccccggcatgaaccaccgggtggagatcacagagggaatcctggcagacgagtgcgccgccctgctgagcgatttctttagaatgcggagacaggagatcaaggcccagaagaaggcacagagctccaccgactctggaggatctagcggaggatcctctggaagcgagacaccaggcacaagcgagtccgccacaccagagagctccggcggctcctccggaggatcctctgaggtggagttttcccacgagtactggatgagacatgccctgaccctggccaagagggcacgcgatgagagggaggtgcctgtgggagccgtgctggtgctgaacaatagagtgatcggcgagggctggaacagagccatcggcctgcacgacccaacagcccatgccgaaattatggccctgagacagggcggcctggtcatgcagaactacagactgattgacgccaccctgtacgtgacattcgagccttgcgtgatgtgcgccggcgccatgatccactctaggatcggccgcgtggtgtttggcgtgaggaacgcaaaaaccggcgccgcaggctccctgatggacgtgctgcactaccccggcatgaatcaccgcgtcgaaattaccgagggaatcctggcagatgaatgtgccgccctgctgtgctatttctttcggatgcctagacaggtgttcaatgctcagaagaaggcccagagctccaccgactccggaggatctagcggaggctcctctggctctgagacacctggcacaagcgagagcgcaacacctgaaagcagcgggggcagcagcggggggtcagacaagaagtacagcatcggcctggccatcggcaccaactctgtgggctgggccgtgatcaccgacgagtacaaggtgcccagcaagaaattcaaggtgctgggcaacaccgaccggcacagcatcaagaagaacctgatcggagccctgctgttcgacagcggcgaaacagccgaggccacccggctgaagagaaccgccagaagaagatacaccagacggaagaaccggatctgctatctgcaagagatcttcagcaacgagatggccaaggtggacgacagcttcttccacagactggaagagtccttcctggtggaagaggataagaagcacgagcggcaccccatcttcggcaacatcgtggacgaggtggcctaccacgagaagtaccccaccatctaccacctgagaaagaaactggtggacagcaccgacaaggccgacctgcggctgatctatctggccctggcccacatgatcaagttccggggccacttcctgatcgagggcgacctgaaccccgacaacagcgacgtggacaagctgttcatccagctggtgcagacctacaaccagctgttcgaggaaaaccccatcaacgccagcggcgtggacgccaaggccatcctgtctgccagactgagcaagagcagacggctggaaaatctgatcgcccagctgcccggcgagaagaagaatggcctgttcggaaacctgattgccctgagcctgggcctgacccccaacttcaagagcaacttcgacctggccgaggatgccaaactgcagctgagcaaggacacctacgacgacgacctggacaacctgctggcccagatcggcgaccagtacgccgacctgtttctggccgccaagaacctgtccgacgccatcctgctgagcgacatcctgagagtgaacaccgagatcaccaaggcccccctgagcgcctctatgatcaagagatacgacgagcaccaccaggacctgaccctgctgaaagctctcgtgcggcagcagctgcctgagaagtacaaagagattttcttcgaccagagcaagaacggctacgccggctacattgacggcggagccagccaggaagagttctacaagttcatcaagcccatcctggaaaagatggacggcaccgaggaactgctcgtgaagctgaacagagaggacctgctgcggaagcagcggaccttcgacaacggcagcatcccccaccagatccacctgggagagctgcacgccattctgcggcggcaggaagatttttacccattcctgaaggacaaccgggaaaagatcgagaagatcctgaccttccgcatcccctactacgtgggccctctggccaggggaaacagcagattcgcctggatgaccagaaagagcgaggaaaccatcaccccctggaacttcgaggaagtggtggacaagggcgcttccgcccagagcttcatcgagcggatgaccaacttcgataagaacctgcccaacgagaaggtgctgcccaagcacagcctgctgtacgagtacttcaccgtgtataacgagctgaccaaagtgaaatacgtgaccgagggaatgagaaagcccgccttcctgagcggcgagcagaaaaaggccatcgtggacctgctgttcaagaccaaccggaaagtgaccgtgaagcagctgaaagaggactacttcaagaaaatcgagtgcttcgactccgtggaaatctccggcgtggaagatcggttcaacgcctccctgggcacataccacgatctgctgaaaattatcaaggacaaggacttcctggacaatgaggaaaacgaggacattctggaagatatcgtgctgaccctgacactgtttgaggacagagagatgatcgaggaacggctgaaaacctatgcccacctgttcgacgacaaagtgatgaagcagctgaagcggcggagatacaccggctggggcaggctgagccggaagctgatcaacggcatccgggacaagcagtccggcaagacaatcctggatttcctgaagtccgacggcttcgccaacagaaacttcatgcagctgatccacgacgacagcctgacctttaaagaggacatccagaaagcccaggtgtccggccagggcgatagcctgcacgagcacattgccaatctggccggcagccccgccattaagaagggcatcctgcagacagtgaaggtggtggacgagctcgtgaaagtgatgggccggcacaagcccgagaacatcgtgatcgaaatggccagagagaaccagaccacccagaagggacagaagaacagccgcgagagaatgaagcggatcgaagagggcatcaaagagctgggcagccagatcctgaaagaacaccccgtggaaaacacccagctgcagaacgagaagctgtacctgtactacctgcagaatgggcgggatatgtacgtggaccaggaactggacatcaaccggctgtccgactacgatgtggaccatatcgtgcctcagagctttctgaaggacgactccatcgacaacaaggtgctgaccagaagcgacaagaaccggggcaagagcgacaacgtgccctccgaagaggtcgtgaagaagatgaagaactactggcggcagctgctgaacgccaagctgattacccagagaaagttcgacaatctgaccaaggccgagagaggcggcctgagcgaactggataaggccggcttcatcaagagacagctggtggaaacccggcagatcacaaagcacgtggcacagatcctggactcccggatgaacactaagtacgacgagaatgacaagctgatccgggaagtgaaagtgatcaccctgaagtccaagctggtgtccgatttccggaaggatttccagttttacaaagtgcgcgagatcaacaactaccaccacgcccacgacgcctacctgaacgccgtcgtgggaaccgccctgatcaaaaagtaccctaagctggaaagcgagttcgtgtacggcgactacaaggtgtacgacgtgcggaagatgatcgccaagagcgagcaggaaatcggcaaggctaccgccaagtacttcttctacagcaacatcatgaactttttcaagaccgagattaccctggccaacggcgagatccggaagcggcctctgatcgagacaaacggcgaaaccggggagatcgtgtgggataagggccgggattttgccaccgtgcggaaagtgctgagcatgccccaagtgaatatcgtgaaaaagaccgaggtgcagacaggcggcttcagcaaagagtctatcctgcccaagaggaacagcgataagctgatcgccagaaagaaggactgggaccctaagaagtacggcggcttcgacagccccaccgtggcctattctgtgctggtggtggccaaagtggaaaagggcaagtccaagaaactgaagagtgtgaaagagctgctggggatcaccatcatggaaagaagcagcttcgagaagaatcccatcgactttctggaagccaagggctacaaagaagtgaaaaaggacctgatcatcaagctgcctaagtactccctgttcgagctggaaaacggccggaagagaatgctggcctctgccggcgaactgcagaagggaaacgaactggccctgccctccaaatatgtgaacttcctgtacctggccagccactatgagaagctgaagggctcccccgaggataatgagcagaaacagctgtttgtggaacagcacaagcactacctggacgagatcatcgagcagatcagcgagttctccaagagagtgatcctggccgacgctaatctggacaaagtgctgtccgcctacaacaagcaccgggataagcccatcagagagcaggccgagaatatcatccacctgtttaccctgaccaatctgggagcccctgccgccttcaagtactttgacaccaccatcgaccggaagaggtacaccagcaccaaagaggtgctggacgccaccctgatccaccagagcatcaccggcctgtacgagacacggatcgacctgtctcagctgggaggtgactctggcggctcaaaaagaaccgccgacggcagcgaattcgagcccaagaagaagaggaaagtctaaccggtcatcatcaccatcaccattgagtttaaacccgctgatcagcctcgactgtgccttctagttgccagccatctgttgtttgcccctcccccgtgccttccttgaccctggaaggtgccactcccactgtcctttcctaataaaatgaggaaattgcatcgcattgtctgagtaggtgtcattctattctggggggtggggtggggcaggacagcaagggggaggattgggaagacaatagcaggcatgctggggatgcggtgggctctatggcttctgaggcggaaagaaccagctggggctcgataccgtcgacctctagctagagcttggcgtaatcatggtcatagctgtttcctgtgtgaaattgttatccgctcacaattccacacaacatacgagccggaagcataaagtgtaaagcctagggtgcctaatgagtgagctaactcacattaattgcgttgcgctcactgcccgctttccagtcgggaaacctgtcgtgccagctgcattaatgaatcggccaacgcgcggggagaggcggtttgcgtattgggcgctcttccgcttcctcgctcactgactcgctgcgctcggtcgttcggctgcggcgagcggtatcagctcactcaaaggcggtaatacggttatccacagaatcaggggataacgcaggaaagaacatgtgagcaaaaggccagcaaaaggccaggaaccgtaaaaaggccgcgttgctggcgtttttccataggctccgcccccctgacgagcatcacaaaaatcgacgctcaagtcagaggtggcgaaacccgacaggactataaagataccaggcgtttccccctggaagctccctcgtgcgctctcctgttccgaccctgccgcttaccggatacctgtccgcctttctcccttcgggaagcgtggcgctttctcatagctcacgctgtaggtatctcagttcggtgtaggtcgttcgctccaagctgggctgtgtgcacgaaccccccgttcagcccgaccgctgcgccttatccggtaactatcgtcttgagtccaacccggtaagacacgacttatcgccactggcagcagccactggtaacaggattagcagagcgaggtatgtaggcggtgctacagagttcttgaagtggtggcctaactacggctacactagaagaacagtatttggtatctgcgctctgctgaagccagttaccttcggaaaaagagttggtagctcttgatccggcaaacaaaccaccgctggtagcggtggtttttttgtttgcaagcagcagattacgcgcagaaaaaaaggatctcaagaagatcctttgatcttttctacggggtctgacactcagtggaacgaaaactcacgttaagggattttggtcatgagattatcaaaaaggatcttcacctagatccttttaaattaaaaatgaagttttaaatcaatctaaagtatatatgagtaaacttggtctgacagttaccaatgcttaatcagtgaggcacctatctcagcgatctgtctatttcgttcatccatagttgcctgactccccgtcgtgtagataactacgatacgggagggcttaccatctggccccagtgctgcaatgataccgcgagacccacgctcaccggctccagatttatcagcaataaaccagccagccggaagggccgagcgcagaagtggtcctgcaactttatccgcctccatccagtctattaattgttgccgggaagctagagtaagtagttcgccagttaatagtttgcgcaacgttgttgccattgctacaggcatcgtggtgtcacgctcgtcgtttggtatggcttcattcagctccggttcccaacgatcaaggcgagttacatgatcccccatgttgtgcaaaaaagcggttagctccttcggtcctccgatcgttgtcagaagtaagttggccgcagtgttatcactcatggttatggcagcactgcataattctcttactgtcatgccatccgtaagatgcttttctgtgactggtgagtactcaaccaagtcattctgagaatagtgtatgcggcgaccgagttgctcttgcccggcgtcaatacgggataataccgcgccacatagcagaactttaaaagtgctcatcattggaaaacgttcttcggggcgaaaactctcaaggatcttaccgctgttgagatccagttcgatgtaacccactcgtgcacccaactgatcttcagcatcttttactttcaccagcgtttctgggtgagcaaaaacaggaaggcaaaatgccgcaaaaaagggaataagggcgacacggaaatgttgaatactcatactcttcctttttcaatattattgaagcatttatcagggttattgtctcatgagcggatacatatttgaatgtatttagaaaaataaacaaataggggttccgcgcacatttccccgaaaagtgccacctgacgtcgacggatcgggagatcgatctcccgatcccctagggtcgactctcagtacaatctgctctgatgccgcatagttaagccagtatctgctccctgcttgtgtgttggaggtcgctgagtagtgcgcgagcaaaatttaagctacaacaaggcaaggcttgaccgacaattgcatgaagaatctgcttagggttaggcgttttgcgctgcttcgcgatgtacgggccagatatacgcgttgacattgattattgactagttattaatagtaatcaattacggggtcattagttcatagcccatatatggagttccgcgttacataacttacggtaaatggcccgcctggctgaccgcccaacgacccccgcccattgacgtcaataatgacgtatgttcccatagtaacgccaatagggactttccattgacgtcaatgggtggagtatttacggtaaactgcccacttggcagtacatcaagtgtatc

SEQ ID NO: 379 - protein, 357 aa, Homo sapiens
MEEGMNVLHDFGIQSTHYLQVNYQDSQDWFILVSVIADLRNAFYVLFPIWFHLQEAVGIKLLWVAVIGDWLNLVFKWILFGQRPYWWVLDTDYYSNTSVPLIKQFPVTCETGPGSPSGHAMGTAGVYYVMVTSTLSIFQGKIKPTYRFRCLNVILWLGFWAVQLNVCLSRIYLAAHFPHQVVAGVLSGIAVAETFSHIHSIYNASLKKYFLITFFLFSFAIGFYLLLKGLGVDLLWTLEKAQRWCEQPEWVHIDTTPFASLLKNLGTLFGLGLALNSSMYRESCKGKLSKWLPFRLSSIVASLVLLHVFDSLKPPSQVELVFYVLSFCKSAVVPLASVSVIPYCLAQVLGQPHKKSL

SEQ ID NO: 380 - DNA, 13637 bp, Homo sapiens
atagcagagcaatcaccaccaagcctggaataactgcaagggctctgctgacatcttcctgaggtgccaaggaaatgaggatggaggaaggaatgaatgttctccatgactttgggatccagtcaacacattacctccaggtgaattaccaagactcccaggactggttcatcttggtgtccgtgatcgcagacctcaggaatgccttctacgtcctcttccccatctggttccatcttcaggaagctgtgggcattaaactcctttgggtagctgtgattggagactggctcaacctcgtctttaagtggtaagaaccatatagagaggagatcagcaagaaaagaggctggcattcgctctcgcaatgtctgtccatcagaagttgctttccccaggctattcaggaagccacgggctactcatgcttccaacccctctctctgactttggatcatctacataaagggggaagacagaaaaaatcctaccagtgagttgaaaatacaggaaagcctatttcatatgggttaaagggtaggacagttgaatttcgtgaaaagtctgagttatataggctttgagcaaagagttttattagtatgaagcagaagaggtaacataaagaaagatgtatggggccaggcatggtggctcacacctgtaatcccagcactttgggaggccgaggtgggcgaatcactcctgggtgaactcaggagttcaagaccagcctgggcaacatggcgaaactccatctctacaaaaacattacgaaaattagctgggcgtgttggtgctgtagtcccagctactcaggaggctgaggtgagaggcggaggaggttgcagtgagtcaagatcatgccactgcactccagcctgggcaacagagtaagaccctgtctcaaaaaaaaaaaaaagatagatgatgtatgctgtatgaaaaaaggaaacacacagatgattcaacagcctgttttgtggggtaatgaaaagtcaccctgggaactgggctccagccctcgttctgccacccaccaactacatgtccttggcaagtcatatcaattatctgagtttctgttttataatctacaaataggttatctctggcagcttaataataatcagggttaacatttattaaacagtgtgtgccagtccatgtgctatgtgcttttctgtgaggtagttactgctatttacagaaacagtagatgcagagaccaaggtgctgagttaaatgattaggccaacaaggttagtacatgccgagccaggatggaagcccaggtaggcaggctggcttccgcggcaatgctcttatgaactatgttacgtccagtgctgataaactgactctctggggagcaggggaaagccctgagtttagcatttgccaatttctatcacgtaaacattcccattctggccactttctttctttctttcttttgtttgtttgtttgagatggagtctcgcactgttgcctggctggagtgcaatggtgcaatctcagctcactgcaacctctgcctctccggttcaagtgattctcctgcctcagcctcccaagtagctgggattacaggtgcccgccaccatgcccagctaattttttttgtatttttagtagagacatggtttcactatgttgactaggctggtctcgaactcctgacctcatgatctgcctgccttggcctccctaagtgctaggattacaggcgtgagccactacacccagccgcatgattctaaaaaataaaaagatgaagtgttattccaaacatctgatctccattgaagaaccatgcaatctctctgggttgatagaggccagagttagtggctctccctgatttcggtgagaaatcactattccaccatcacgggataaaaggcatcctgactggcggttgacacctatttccacagtgaaagatatatctagtacttttaaaggggaagtggtttgtctgagatactctgtttcaaagtagagaggatacagaacaagcatctgaagctatatacatccttacagagagcaattctgatggaaatgcaggccatgtttccctggggggggctcgtcctaggggctggagtgcattctctgatgtcagaggaaatgcaagattccctgaggcctgagggaacccatggtatatgcaagtccaagtttcaaactgtagttccatatgcattcttccaggacaaatacttcttgaggttaaaaaaaaaaagtcacatagctgccattttatggatttcaggatttttttttttttttttttgagatggagtcttgctctgtcacccagcctgtagtgcagtggcataatctcggctcacggcaacctccgcctcccaggttcaagcgattctcttgccttagcctcccgagtagctgggattacagtcacgcaccaccacatctggctaattctttatattttttggtagaaacggtgtttcaccatgttggccaggctggtctcaaactcctgacctcatgtgatctgcctgccttggcctcccaaagtgctgagattacaggtgtgagccaccgcgcctgcctggagttcagaatcttgggcttcattatttgtgtttaaatagatcatacagtcaggcacggtggctcatgcctgtaatcccagcactttgggaggctgaggtgggaggattgcctgagttcaggagatggagaccagcctgggcaacatggtgaaaccccgtctctactaaaaatacaaaaactagctggatgtggtggcacacacctgtagtcccagctattcaggaggctgaggtgggaggatcccaggaggtagaggtcacaatgagccgagattgcgccactgcactccaggctgggttactgagccagatcctgtctcaaaaaaaaaaaagataatacattcaaacagttcaaaatgcaaaagttacatacataaggaagtgtcatgaaatatctccctctcacacttctccccagccacccagttctcccttctagaggcaacatgtgaaatccttctcaggctacactcttcttgaaggtgtaggctttgggcaaaagcattcattcagtaaccccagaaacttgttctgtttttccataggattctctttggacagcgtccatactggtgggttttggatactgactactacagcaacacttccgtgcccctgataaagcagttccctgtaacctgtgagactggaccaggtaagcgtcccagcccctgcagacagaagctgagtggacctcgtttacctgttatggatgaaactgaccttgaggggacatgaggagagccattcctttgtacttttgtcatgctcttcaattggcacaaattaattcacttctgcaatactttcctgaatagcacagtagtattggaaatctgcctattacagaacctggatggagtccagagaggcacgggcatccatgggcaaagggctcgtgagagtcaccgccctgcagcgctgtgtcctgagaaaggagggggcagaagcctgagcttctgggggtccttcccaatggcctggcccactggatgtgccctcctgagctgaccgtccaatcccttgccctctctgtgcctacgttttattagttacagccagatggttactgtcaaatcaaatgatagatttcattttcagtatgtaataggaagcccctccctcaccctaaagtctcagctgccctctaagactagtactctctaaggtactagtatcccttcctcagagaccctttccctgaccccaaaactagggaaggtcccttagttatttgctctcacagaccacgcatttacctcagagcatattcactcattcagctgttacttaccaagcacctactgggagctatacactgttctatgtgctagggatacctctgtcagtgaacaacacagacacaaagatccctgcccttgtggagctgaaatctgaatagaggaggtgaaatatacaaaaattataataaataagtaaactaggccagttgtggttgctcatgcctgtaatcccagcactttgggaagccaaggtaggtagatcacctgaggtcaggagttcaaaaccagcctggccaacattgcaaaatcctgtctttactaaaaatggaaaaattggtcaggcgtgatggcacacgcctgtagtctcagctacctgggaggctgaggcaggagaatcgcttgaacctgggaggcagaggttgcagtgaaccgagatcggaccactgcactccagcctgaatgacagaacgagactctgtctcaaaaaaaaagtaaactattaatatgtaggataggccaggcacggtggctcaccctgtaatcccagcactttgggaggctgaggcgggtggatcacctgaggtgaggagttcaagaccagcctggccaacatggcaaaaccctgtctctactaaaaatacaaaaattagctgggtgtcctggtgcatgcctgtaatctgagctactcaggaggctaaggcaggagaatcgcttgaacctgggaggtggtgagccaagattgcgccattgcactccagcctgggcgacaaaatgagacaccatctgaaaaaaaaaaaaaaatatatatatatatacacacacacacacacacacacacacacacacatataatactagaaaatgattgtttataggcaaaaaaaaaaaaaaagaagaagaagaagaaaaggaaaggagaaggaaagaaggaccaaacatcttttgtagaaatatgtttgctttcatcataacagcttgttatcaaggatgaatttctccctgaaattaatggaggcacagactggaaagtttaaagtggctttaagaggttattttatttagtcctctgtcttaatagaagcaaattattatctctgctccttaggtagagtagctaaggctcagaaagtaggccgggcgcggtggctcacgcctgtaatcctagcactttgggaggccaacgcaggtggatcacctgaggtcaggagtttgagaccagcctggccaacatggtgaaacctcgtcactaataaaaaaatacaaaaacttagccaggcatggtggcgggcgcctgtaatcccagctacccaggaggctgcggcaggagaatcacttcaacccgggaggcagaggttgcagtgagctgaaatcacaccactgcactccagccttggtgacagagaaagattctgtcaggaaaaaaaaaaaaaagtttaaatgaattacccaaggtatataattgttagtgttagaaggaagaagaagggagggaggaaggaagggagaaagaaagggaaggaggaagggagggagggaagaaagcctttatttatctatggggttccctggaaagcaggctgaaatggagattcacgtgcaggagtttagatactctggggaactatacttgtagaagggaaggaacaggaacagggcagaaggagaggtccggttgtgattctgcctcatccaaccccacagcgagctctgaagctggggatggctcctcagagttggtccaagttgggacaagggaatcagaccctggggagagcgtaaccttgatcaaggcgactctctttagcccagggcaatgccaggagaaggctgagagcagaaagccatctaccatcacactctcaacagctacgaaataagtcctgcagttcaggagggaggtctgggcggcacatctcaggaccctctatctctcagggtagaggaattaagaatgggatgggaaccagacgggccatggtggctcacacctataatcccaacactttgggaggccaagggtaggaggattgcttgagcccaagagttcaaaaccagcctgggcaaaaacaatcaaacaaacaaacaaaacacatttaaaaaatttgctgtgtgtggtggtgtgcacctgtggtcccagctactcagggggctgaggtgggaggattgcttgagtccaggaggtcgaggctgcagtgagctatgatcatggcactgcattgcagcctaggagacaaagcaagacactgtctctaaaaaaacaaaaaacaaacaaataaaaaaacggaaccggttgcaagcagggttaaatagcgtggtcagagtaggactcactgagaatatgagatctgagtcaagtcttcaaggatgtgaggaagtaagtttctggcagaagagctgtgaagggctgtctggccagagaagattgcaatgcaaaagccctgaggtgggaacgtgtttggtgtgtttaaaggaaagcaatgaggccagtgtagccagaacagagtgtgcaaggagagaaggaacagaagatgtggagggcagatcagtttgtaattgtacgcccagtatgctgattctttgtgtaatctccagactgtattaaactgcaagagcagggcccctctctggctttgctcatcattgtattcccagagccttgcacaatgcttggtgcataggagatggaaatttgttaaataaatgaattatggataacgaatggatggtaagatgggtggatggatggggggtgaacggatggatggggggtgaatggatggatgaatgggtagatgggtggatagggggatggctgggtggctgggtagatgatgcactgtctcccagatgaggaccttttcacctttactccattctctttcctgccctttagggagcccctctggccatgccatgggcacagcaggtgtatactacgtgatggtcacatctactctttccatctttcagggaaagataaagccgacctacagatttcggtaagaactcaccactggggtgtaggtggtggagggcaggaggcagctctctctgtagctgacacaccacgtattcttcctcacatccccctagcccgctcccacacctgggcagccgctgattaagagttgtggcactttggatagggataaacctcagagtcagggaatgtttgggctgaaagggatccagtagtgcaatccgttgttttacagataaggaaacaaagcccaacaccatgaagggacttataaaaataaggtagtgaagtagcagcagggcttaaataaaaacccatgtctgtaccaaccacagagtcacccatccaggttaaaataaccagagaaacagaagatattcctactacagagaattccgggtgtgcagccacagtgcaaatcctttttatttttatttttgagatgcagtctcgctctgtcatccaggctgaagtgcagtggcacgatcatgtctcgctgcaacctctgcctcccaggctcaagcgatcctcccacctcagccatctgagtagctgggaccacaggccacacaccacacccagctaatttctcgtatctttttgtagagacagagttctgctatgttgcccaggctcaggctggtcttgatctcaagcaattggcttgcctcagcctcctaaaatattgggattacaggcatgagccaccgcgccagccatgcaaatccttaattatcaaacagataaaatagggaagttaaaattcatatacacaagggttaaccacttgccacaggcattttttttttttttttgagacggaatctcgctctgttgcccaggctggagtgcagtggcgccatctcgcctcactgcaacctccgcttcctgggttcaagctattcttctgcctcagcctaccgagtagctgggactacaggcacgtgccaccacacctggctaatttttttatttttagtagagatggggtttcaccatattggccaggctggtcttgaactcctgacctagtgatccatccgcctcagcctcccaaagtgctgggattgcaggcatgagccaccgcgcctggccttttttttttttttttgagacggagttttgctcttgttgcccaggctagagtgcagtggcgcagtctcggctcactgtaacctccacctcctgagttcaagcaattctcctgcctcagcctctcaaatagctgggattacaggcgtgagccaccccacctggctaattttgtaattttttttttagtagagatggggtttcacctgttgatcaggctggtctcaaactcctgacctcaagtgatccacccacctcggcctcccaaagtgctgggattacaagcataagccaccgtgcctggtcaattttgatcttttttaaagagacaggggtcttgctatgttgcccagactagtcttgaactcctggcctcaagtgatcctctcacctcggcctcccaaagtattgggattacaggtctgagccgctgcacccagcccccaacaggcatctttggacttttgagtactggctttaatttacaaaaattccactgagagcacctaagtttgccaggctccaacatttctgcaggggctgttttctttgctgaaggatctgcacctgtgttctgttatggttgcctcttctgttgcaggtgcttgaatgtcattttgtggttgggattctgggctgtgcagctgaatgtctgtctgtcacgaatctaccttgctgctcattttcctcatcaagttgttgctggagtcctgtcaggtatgggctgatctgactcccttccttctcccccaaaccccattccgtttctctccctaatcaggacaaaatcccagcattccagccacatcctgtgtgtaatcagtactgttagcatttctgtgggttgaaagtcaagaatgagcaacttgaaatgattaatttctataagagtgcccagatctatagaatgaattgtgtagaagttaccatacatcaaattaacgcaccaaattgaattagcttgaaatctcagagctttttacaatctttatttcttactggtcttcaacaggccctaatttacttttcagggaatctgccaaatttaacaaattaacacgatgtcctaggaaagctgttcatttaaatacattcatttgcaaacctaatagataactgcagttgatctcttttataggttcagagttttgaatatgtttttttttgttttttttttttgagatggagtctcgctctgtgacccaggctagagtgcagtggtgcgatctcggctcactgcaagctccacctcctgggttcacgccattctcctgcctcagcctctccgagtagctgggactacaggcgcccgccaccatgcccggctaattttttgtatttttagcagagacggggtttcaccgtggtcttgatctcctgacctcgtgatccgcccgcctcggcctcccaaagcgctgggattacaagggtgagccaccgcaccctgcctgaatatgtgttttcttagatccaattaacaagggtaagacaagatttaagttaagcataagaaagattttgtgggaggcactggaatataagaccttaacaaaactgtggaatttctcccctggagatttgtaagaacggaacatagcagcattcaaagaagaatgttgagaacaagggagataatggtttcatggtaatcacaaaagtaacacagcatttagtactgggttccatgtttgaggaagaacctggaagccatatcacatgaaaaacctgggaatgtttaggttagagagaataactgtgttcaaatgtgtgacagagggactagattcatcacttactaactcctgcagaaagaactgagaaaaatagacagtattagagggggaccagtttcacacagacaaggaagaactattcagcaatcaattccgttcaaagataaaatggactgttatagtgggggtgagctccctacctctgagggtatttcaagtagagataggaggacctcctggtaggaaatttgcatacggtgggagattgtacgtgatatggcacctccatctgaaagagtctatattgagggcaggctggagtcacacatgggaataagccaggcgaccctcccatctgccatctgtgatttaattccacagtcgcagaacggatggcatgtcacccactcctccaaacccacctctagcaaaggtcccaaatccttcctatctctcacagtcatgctttcttccactcaggcattgctgttacagaaactttcagccacatccacagcatctataatgccagcctcaagaaatattttctcattaccttcttcctgttcagcttcgccatcggattttatctgctgctcaagggactgggtgtagacctcctgtggactctggagaaagcccagaggtggtgcgagcagccagaatgggtccacattgacaccacaccctttgccagcctcctcaagaacctgggcacgctctttggcctggggctggctctcaactccagcatgtacagggagagctgcaaggggaaactcagcaagtggctcccattccgcctcagctctattgtagcctccctcgtcctcctgcacgtctttgactccttgaaacccccatcccaagtcgagctggtcttctacgtcttgtccttctgcaagagtgcggtagtgcccctggcatccgtcagtgtcatcccctactgcctcgcccaggtcctgggccagccgcacaagaagtcgttgtaagagatgtggagtcttcggtgtttaaagtcaacaaccatgccagggattgaggaggactactatttgaagcaatgggcactggtatttggagcaagtgacatgccatccattctgccgtcgtggaattaaatcacggatggcagattggagggtcgcctggcttattcccatgtgtgactccagcctgccctcagcacagactctttcagatggaggtgccatatcacgtacaccatatgcaagtttcccgccaggaggtcctcctctctctacttgaatactctcacaagtagggagctcactcccactggaacagcccattttatctttgaatggtcttctgccagcccattttgaggccagaggtgctgtcagctcaggtggtcctcttttacaatcctaatcatattgggtaatgtttttgaaaagctaatgaagctattgagaaagacctgttgctagaagttgggttgttctggattttcccctgaagacttacttattcttccgtcacatatacaaaagcaagacttccaggtagggccagctcacaagcccaggctggagatcctaactgagaattttctacctgtgttcattcttaccgagaaaaggagaaaggagctctgaatctgataggaaaagaaggctgcctaaggaggagtttttagtatgtggcgtatcatgcaagtgctatgccaagccatgtctaaatggctttaattatatagtaatgcactctcagtaatgggggaccagcttaagtataattaatagatggttagtggggtaattctgcttctagtattttttttactgtgcatacatgttcatcgtatttccttggatttctgaatggctgcagtgacccagatattgcactaggtcaaaacattcaggtatagctgacatctcctctatcacattacatcatcctccttataagcccagctctgctttttccagattcttccactggctccacatccaccccactggatcttcagaaggctagagggcgactctggtggtgcttttgtatgtttcaattaggctctgaaatcttgggcaaaatgacaaggggagggccaggattcctctctcaggtcactccagtgttacttttaattcctagagggtaaatatgactcctttctctatcccaagccaaccaagagcacattcttaaaggaaaagtcaacatcttctctctttttttttttttttgagacagggtctcactatgttgcccaggctgctcttgaattcctgggctcaagcagtcctcccaccctaccacagcgtcccgcgtagctgggactacaggtgcaagccactatgtccagctagccaactcctccttgcctgcttttctttttttttctttttttgagacggcgcacctatcacccaggctggagtggagtggcacgatcttggctcactgcaacctcttcctcctggttcaagcgattctcatgtctcagcctcctcagtagctaggactaccggcgtgcaccaccatgccaggctaatttttatatttttagaattttagaagagatgggatttcatcatgttggccaggctggtctcgaactcctgacctcaagtgatccacctgccttggcctcccaaggtgctaggattacaggcatgagccaccgcaccgggccctccttgcctgtttttcaatctcatctgatatgcagagtatttctgccccacccacctaccccccaaaaaaagctgaagcctatttatttgaaagtccttgtttttgctactaattatatagtataccatacattatcattcaaaacaaccatcctgctcataacatctttgaaaagaaaaatatatatgtgcagtattttattaaagcaacattttatttaagaataaagtcttgttaattactatattttagatgcaatgtgatctgaagtttctaattctggcccaactaaatttctagctctgtttccctaaacaaataatttggtttctctgtgcctgcattttccctttggagaagaaaagtgctctctcttgagttgaccgagagtcccattagggatagggagacttaaatgcatccacaggggcacaggcagagttgagcacataaacggaggcccaaaatcagcatagaaccagaaagattcagagttggccaagaatgaacattggctaccagaccacaagtcagcatgagttgctctatggcatcaaattgcaacttgagagtagatgggcagggtcactatcaaattaagcaatcagggcacacaagttgcagtaacacaacaagactaggccagctctggaatccagtaactcagtgtcagcaaggttttgggttatagttcaagaaagtctaaacagagccagtcacagcaccaaggaatgctcaagggagctattgcaggtttctctgctaagagatttatttcatcctgggtgcagggttcgacctccaaaggcctcaaatcatcaccgtatcaatggatttcctgagggtaagctccgctatttcacacctgaactccggagtctgtatattcagggaagattgcattctcctactggatttgggctctcagagggcgttgtgggaaccaggcccctcacagaatcaaatggtcccaaccagggagaaagaaaatagtcttttttttttttttaatagagatgggggtctcactatgctgcccaggctggtcttgaactcctgggttcaagtgatcctcctgcctcagcctcccaaagtgctgggattacagtgtgagccactgcgcttggccagaaatggttttgatctgtctgaactgaaccctactgcttaggcatagccccatccttgataatctatttgctcccaaggaccaagtccaagatccttacaagaaaggtctgccagaaagtaaatactgcccccactccctgaagtttatgaggttgataagaaaacataacagataaagtttattgagtgctaacttta

SEQ ID NO: 381 - DNA, 306 bp, Artificial Sequence
  Description of artificial sequence: synthetic polynucleotide sequence
tgcctgtcatacgaaaccgagatactgacagtagaatatggccttctgccaatcgggaagattgtggagaaacggatagaatgcacagtttactctgtcgataacaatggtaacatttatactcagccagttgcccagtggcacgaccggggagagcaggaagtattcgaatactgtctggaggatggaagtctcattagggccactaaggaccacaaatttatgacagtcgatggccagatgctgcctatagacgaaatctttgagcgagagttggacctcatgcgagttgacaaccttcctaat

SEQ ID NO: 382 - protein, 102 aa, Artificial Sequence
  Description of artificial sequence: synthetic polypeptide sequence
CLSYETEILTVEYGLLPIGKIVEKRIECTVYSVDNNGNIYTQPVAQWHDRGEQEVFEYCLEDGSLIRATKDHKFMTVDGQMLPIDEIFERELDLMRVDNLPN

SEQ ID NO: 383 - DNA, 108 bp, Artificial Sequence
  Description of artificial sequence: synthetic polynucleotide sequence
atgatcaagatagctacaaggaagtatcttggcaaacaaaacgtttatgatattggagtcgaaagagatcacaactttgctctgaagaacggattcatagcttctaat

SEQ ID NO: 384 - protein, 36 aa, Artificial Sequence
  Description of artificial sequence: synthetic polypeptide sequence
MIKIATRKYLGKQNVYDIGVERDHNFALKNGFIASN

SEQ ID NO: 385 - DNA, 303 bp, Artificial Sequence
  Description of artificial sequence: synthetic polynucleotide sequence
tgcctgtcttatgataccgagatacttaccgttgaatatggcttcttgcctattggaaagattgtcgaagagagaattgaatgcacagtatatactgtagacaagaatggtttcgtttacacacagcccattgctcaatggcacaatcgcggcgaacaagaagtatttgagtactgtctcgaggatggaagcatcatacgagcaactaaagatcataaattcatgaccactgacgggcagatgttgccaatagatgagatattcgagcggggcttggatctcaaacaagtggatggattgcca

SEQ ID NO: 386 - protein, 101 aa, Artificial Sequence
  Description of artificial sequence: synthetic polypeptide sequence
CLSYDTEILTVEYGFLPIGKIVEERIECTVYTVDKNGFVYTQPIAQWHNRGEQEVFEYCLEDGSIIRATKDHKFMTTDGQMLPIDEIFERGLDLKQVDGLP

SEQ ID NO: 387 - DNA, 159 bp, Artificial Sequence
  Description of artificial sequence: synthetic polypeptide sequence
atgaagaggactgccgatggatcagagtttgaatctcccaagaagaagaggaaagtaaagataatatctcgaaaaagtcttggtacccaaaatgtctatgatattggagtggagaaagatcacaacttccttctcaagaacggtctcgtagccagcaac

SEQ ID NO: 388 - protein, 53 aa, Artificial Sequence
  Description of artificial sequence: synthetic polypeptide sequence
MKRTADGSEFESPKKKRKVKIISRKSLGTQNVYDIGVEKDHNFLLKNGLVASN

SEQ ID NO: 389 - RNA, 125 nt, Artificial Sequence; identical to SEQ ID NO: 318
  Description of artificial sequence: synthetic polynucleotide sequence

SEQ ID NO: 390 - RNA, 80 nt, Artificial Sequence; identical to SEQ ID NO: 317
  Description of artificial sequence: synthetic polynucleotide sequence

SEQ ID NO: 391 - protein, 167 aa, Artificial Sequence
  Description of artificial sequence: synthetic polypeptide sequence
MSEVEFSHEYWMRHALTLAKRAWDEREVPVGAVLVHNNRVIGEGWNRPIGRHDPTAHAEIMALRQGGLVMQNYRLIDATLYVTLEPCVMCAGAMIHSRIGRVVFGARDAKTGAAGSLMDVLHHPGMNHRVEITEGILADECAALLSDFFRMRRQEIKAQKKAQSSTD

SEQ ID NO: 392 - protein, 178 aa, Artificial Sequence
  Description of artificial sequence: synthetic polypeptide sequence
MRRAFITGVFFLSEVEFSHEYWMRHALTLAKRAWDEREVPVGAVLVHNNRVIGEGWNRPIGRHDPTAHAEIMALRQGGLVMQNYRLIDATLYVTLEPCVMCAGAMIHSRIGRVVFGARDAKTGAAGSLMDVLHHPGMNHRVEITEGILADECAALLSDFFRMRRQEIKAQKKAQSSTD

SEQ ID NO: 393 - DNA, 20 bp, Artificial Sequence
  Description of artificial sequence: synthetic oligonucleotide sequence
gggcattaaactcctttggg

SEQ ID NO: 394 - DNA, 20 bp, Artificial Sequence
  Description of artificial sequence: synthetic oligonucleotide sequence
agtctcacaggttacaggga

SEQ ID NO: 395 - DNA, 26 bp, Artificial Sequence
  Description of artificial sequence: synthetic oligonucleotide sequence
cagtatggacactgtccaaagagaat

SEQ ID NO: 396 - RNA, 4090 nt, Artificial Sequence
  Description of artificial sequence: synthetic polynucleotide sequence
aggaaauaagagagaaaagaagaguaagaagaaauauaagagccaccaugagcgaggucgaguucucucacgaauauuggaugagacacgcucucacccuggcuaagagagccagggacgaaagagaggugccaguuggcgcuguccugguguugaacaaucgcgucaucggagaaggauggaaucgcgccauuggccugcacgauccaaccgcacaugccgaaauuauggcucugcggcaaggcggccucgugaugcaaaauuacagacuguacgaugcuacccucuacggcaccuucgagcccugugucaugugugcuggggcaaugauucacucccggauuggccgcgugguguuuggagugcggaaugccaagacuggcgccgcuggaucucugauggacguccugcacuauccugggaugaaccaccgggucgagaucacagagggaauucuggcugacgagugcgcagcccugcugugcgacuucuauagaaugcccagaucgguguucaacgcccagaaaaaagcucagagcaguaccaauuccggcggaagcagcggaggaucuucuggaagcgaaaccccaggcaccagcgagucugccacaccagaaucaucuggcgguagcuccggcggcuccaagagaaauuacauccugggccucgccaucggcaucaccucugucggcuacggcaucaucgacuacgagacacgggaugugauugaugccggcgugcggcuguucaaagaggccaacgucgagaacaacgagggccgcagaucuaagaggggagccagacggcugaagagaaggcggagacacagaauccagagagugaagaagcugcuguucgacuacaaccugcugaccgaccacagcgagcugagcggcaucaacccuuaugaggccagagugaagggccugagccagaagcugagcgaggaagaguuuagcgccgcacugcugcaccuggccaagagaagaggcgugcacaacgugaacgaaguggaagaggacaccggcaacgagcuguccaccaaagagcagaucagcagaaacagcaaggcccuggaagagaaauacguggccgaacugcagcuggaacggcugaaaaaggauggcgaagugcggggcagcaucaaccgguucaagaccagcgacuacgugaaagaagccaaacagcugcugaaggugcagaaggccuaccaccagcuggaccagagcuucaucgacaccuacaucgaccugcuggaaacccggcggaccuacuaugaaggaccuggcgagggaagccccuucggcuggaaggacaucaaagaaugguacgagaugcugaugggccacugcaccuacuuucccgaggaacugcggagcgugaaguacgccuacaacgccgaccuguacaacgcccugaacgaccugaacaaccucgugaucacccgggacgagaacgagaagcuggaauauuacgagaaguuccagaucaucgagaacguguucaagcagaagaagaagcccacacugaagcagaucgccaaagagauccuggucaacgaggaagauaucaagggcuacagagugaccagcaccggcaagcccgaguucaccaaccugaagguguaccacgacaucaaggauaucacagcccggaaagagauuauugagaacgccgagcugcuggaccaaaucgccaagauccugaccaucuaccaguccuccgaggacauccaagaggaacugaccaaucugaacuccgagcugacccaagaagagaucgagcagaucucuaaucugaagggguacacaggcacccacaaccugagccugaaggccaucaaccugauccuggacgagcuguggcacaccaacgacaaccagauugccaucuucaaccggcugaagcuggugcccaagaagguggaccucagccagcagaaagaaauccccaccacacugguggacgacuucauucugagccccguggucaagagaagcuucauccagagcaucaaagugaucaacgccaucaucaagaaguacgggcugcccaacgauaucaucaucgagcuggcccgcgagaagaacuccaaggacgcucagaaaaugaucaacgagaugcagaagcggaaccggcagaccaacgagcggaucgaggaaaucauccggaccaccggcaaagagaacgccaaguaccugaucgagaagaucaagcugcacgacaugcaagagggcaagugucuguacagccuggaagccauuccucuggaagaucugcugaacaaucccuucaacuacgagguggaccacaucauccccagaagcguguccuucgacaacagcuucaacaacaaggugcucgugaagcaagaggaaaacuccaagaagggcaacagaaccccauuccaguaccugagcagcuccgacagcaagaucagcuacgaaaccuucaagaagcacauccugaaucuggccaaaggcaagggccgcaucagcaagaccaagaaagaauaccugcucgaggaacgggacaucaacagauucagcgugcagaaagacuucaucaaucggaaccugguggacaccagauacgccaccagaggccugaugaaucugcugagaagcuacuuccgcgugaacaaucuggacgugaaagucaaguccaucaacggcggcuucaccagcuuucugcggagaaaguggaaguucaagaaagagcggaacaagggcuauaagcaccacgccgaggacgcccugaucauugccaacgccgauuucaucuucaaagaguggaagaaacuggacaaggccaaaaaagugauggaaaaccagauguucgaggaaaagcaggccgagagcaugcccgagaucgaaaccgagcaagaguacaaagagauuuucaucacgccccaccagaucaagcacauuaaggacuucaaggacuacaaguacagccaccgcguggacaagaagccuaauagagagcugauuaacgacacccuguacagcacccggaaggacgacaagggcaauacccugaucgucaacaaccugaacggccuguacgacaaggacaacgacaagcucaagaagcugaucaacaagagccccgagaaacugcugauguaccaccacgauccucagaccuaccagaaacugaagcucaucauggaacaguacggcgacgagaagaauccccuguacaaguacuacgaggaaaccgggaacuaccugaccaaguacuccaaaaaggacaaugggcccgugaucaagaagauuaaguauuacggcaacaagcugaaugcccaccuggacaucaccgacgacuaccccaacuccagaaacaagguggucaagcugucccugaagccuuacagauucgacguguaccuggacaacggcguguacaaguucgugaccgugaagaaccuggaugugaucaaaaaagaaaacuacuacgaagugaacagcaagugcuaugaggaagccaagaaacucaagaaaaucagcaaccaggccgaguuuaucgccuccuucuacaacaacgaucugaucaagaucaacggggagcuguauagagugauuggggucaacaaugaccugcugaaccggaucgaagucaacaugaucgacaucaccuaccgcgaguaccucgagaacaugaacgacaagaggccuccacggaucauuaagacaaucgccagcaagacgcagagcauuaagaaguacagcacugacauucugggcaaccuguacgaagucaagagcaaaaagcacccgcagauuaucaagaaaggcgagggcgccgacaagagaacagccgaugguuccgaguucgaaagccccaagaagaagaggaaagucuaguuaauuaagcugccuucugcggggcuugccuucuggccaugcccuucuucucucccuugcaccuguaccucuuggucuuugaauaaagccugaguaggaagaaaaaaaaaaaaaaaaaaaaaaaaaaaaaaaaaaaaaaaaaaaaaaaaaaaaaaaaaaaaaaaaaaaaaaaaaaaaaaaaaaaaaaaaaaaaaaaaaaaaaaaaaaaaaaaaaaaaaaaa

SEQ ID NO: 397 - DNA, 3822 bp, Artificial Sequence
  Description of artificial sequence: synthetic polynucleotide sequence
atgagcgaggtcgagttctctcacgaatattggatgagacacgctctcaccctggctaagagagccagggacgaaagagaggtgccagttggcgctgtcctggtgttgaacaatcgcgtcatcggagaaggatggaatcgcgccattggcctgcacgatccaaccgcacatgccgaaattatggctctgcggcaaggcggcctcgtgatgcaaaattacagactgtacgatgctaccctctacggcaccttcgagccctgtgtcatgtgtgctggggcaatgattcactcccggattggccgcgtggtgtttggagtgcggaatgccaagactggcgccgctggatctctgatggacgtcctgcactatcctgggatgaaccaccgggtcgagatcacagagggaattctggctgacgagtgcgcagccctgctgtgcgacttctatagaatgcccagatcggtgttcaacgcccagaaaaaagctcagagcagtaccaattccggcggaagcagcggaggatcttctggaagcgaaaccccaggcaccagcgagtctgccacaccagaatcatctggcggtagctccggcggctccaagagaaattacatcctgggcctcgccatcggcatcacctctgtcggctacggcatcatcgactacgagacacgggatgtgattgatgccggcgtgcggctgttcaaagaggccaacgtcgagaacaacgagggccgcagatctaagaggggagccagacggctgaagagaaggcggagacacagaatccagagagtgaagaagctgctgttcgactacaacctgctgaccgaccacagcgagctgagcggcatcaacccttatgaggccagagtgaagggcctgagccagaagctgagcgaggaagagtttagcgccgcactgctgcacctggccaagagaagaggcgtgcacaacgtgaacgaagtggaagaggacaccggcaacgagctgtccaccaaagagcagatcagcagaaacagcaaggccctggaagagaaatacgtggccgaactgcagctggaacggctgaaaaaggatggcgaagtgcggggcagcatcaaccggttcaagaccagcgactacgtgaaagaagccaaacagctgctgaaggtgcagaaggcctaccaccagctggaccagagcttcatcgacacctacatcgacctgctggaaacccggcggacctactatgaaggacctggcgagggaagccccttcggctggaaggacatcaaagaatggtacgagatgctgatgggccactgcacctactttcccgaggaactgcggagcgtgaagtacgcctacaacgccgacctgtacaacgccctgaacgacctgaacaacctcgtgatcacccgggacgagaacgagaagctggaatattacgagaagttccagatcatcgagaacgtgttcaagcagaagaagaagcccacactgaagcagatcgccaaagagatcctggtcaacgaggaagatatcaagggctacagagtgaccagcaccggcaagcccgagttcaccaacctgaaggtgtaccacgacatcaaggatatcacagcccggaaagagattattgagaacgccgagctgctggaccaaatcgccaagatcctgaccatctaccagtcctccgaggacatccaagaggaactgaccaatctgaactccgagctgacccaagaagagatcgagcagatctctaatctgaaggggtacacaggcacccacaacctgagcctgaaggccatcaacctgatcctggacgagctgtggcacaccaacgacaaccagattgccatcttcaaccggctgaagctggtgcccaagaaggtggacctcagccagcagaaagaaatccccaccacactggtggacgacttcattctgagccccgtggtcaagagaagcttcatccagagcatcaaagtgatcaacgccatcatcaagaagtacgggctgcccaacgatatcatcatcgagctggcccgcgagaagaactccaaggacgctcagaaaatgatcaacgagatgcagaagcggaaccggcagaccaacgagcggatcgaggaaatcatccggaccaccggcaaagagaacgccaagtacctgatcgagaagatcaagctgcacgacatgcaagagggcaagtgtctgtacagcctggaagccattcctctggaagatctgctgaacaatcccttcaactacgaggtggaccacatcatccccagaagcgtgtccttcgacaacagcttcaacaacaaggtgctcgtgaagcaagaggaaaactccaagaagggcaacagaaccccattccagtacctgagcagctccgacagcaagatcagctacgaaaccttcaagaagcacatcctgaatctggccaaaggcaagggccgcatcagcaagaccaagaaagaatacctgctcgaggaacgggacatcaacagattcagcgtgcagaaagacttcatcaatcggaacctggtggacaccagatacgccaccagaggcctgatgaatctgctgagaagctacttccgcgtgaacaatctggacgtgaaagtcaagtccatcaacggcggcttcaccagctttctgcggagaaagtggaagttcaagaaagagcggaacaagggctataagcaccacgccgaggacgccctgatcattgccaacgccgatttcatcttcaaagagtggaagaaactggacaaggccaaaaaagtgatggaaaaccagatgttcgaggaaaagcaggccgagagcatgcccgagatcgaaaccgagcaagagtacaaagagattttcatcacgccccaccagatcaagcacattaaggacttcaaggactacaagtacagccaccgcgtggacaagaagcctaatagagagctgattaacgacaccctgtacagcacccggaaggacgacaagggcaataccctgatcgtcaacaacctgaacggcctgtacgacaaggacaacgacaagctcaagaagctgatcaacaagagccccgagaaactgctgatgtaccaccacgatcctcagacctaccagaaactgaagctcatcatggaacagtacggcgacgagaagaatcccctgtacaagtactacgaggaaaccgggaactacctgaccaagtactccaaaaaggacaatgggcccgtgatcaagaagattaagtattacggcaacaagctgaatgcccacctggacatcaccgacgactaccccaactccagaaacaaggtggtcaagctgtccctgaagccttacagattcgacgtgtacctggacaacggcgtgtacaagttcgtgaccgtgaagaacctggatgtgatcaaaaaagaaaactactacgaagtgaacagcaagtgctatgaggaagccaagaaactcaagaaaatcagcaaccaggccgagtttatcgcctccttctacaacaacgatctgatcaagatcaacggggagctgtatagagtgattggggtcaacaatgacctgctgaaccggatcgaagtcaacatgatcgacatcacctaccgcgagtacctcgagaacatgaacgacaagaggcctccacggatcattaagacaatcgccagcaagacgcagagcattaagaagtacagcactgacattctgggcaacctgtacgaagtcaagagcaaaaagcacccgcagattatcaagaaaggcgagggcgccgacaagagaacagccgatggttccgagttcgaaagccccaagaagaagaggaaagtctag

SEQ ID NO: 398 - protein, 1273 aa, Artificial Sequence
  Description of artificial sequence: synthetic polypeptide sequence
MSEVEFSHEYWMRHALTLAKRARDEREVPVGAVLVLNNRVIGEGWNRAIGLHDPTAHAEIMALRQGGLVMQNYRLYDATLYGTFEPCVMCAGAMIHSRIGRVVFGVRNAKTGAAGSLMDVLHYPGMNHRVEITEGILADECAALLCDFYRMPRSVFNAQKKAQSSTNSGGSSGGSSGSETPGTSESATPESSGGSSGGSKRNYILGLAIGITSVGYGIIDYETRDVIDAGVRLFKEANVENNEGRRSKRGARRLKRRRRHRIQRVKKLLFDYNLLTDHSELSGINPYEARVKGLSQKLSEEEFSAALLHLAKRRGVHNVNEVEEDTGNELSTKEQISRNSKALEEKYVAELQLERLKKDGEVRGSINRFKTSDYVKEAKQLLKVQKAYHQLDQSFIDTYIDLLETRRTYYEGPGEGSPFGWKDIKEWYEMLMGHCTYFPEELRSVKYAYNADLYNALNDLNNLVITRDENEKLEYYEKFQIIENVFKQKKKPTLKQIAKEILVNEEDIKGYRVTSTGKPEFTNLKVYHDIKDITARKEIIENAELLDQIAKILTIYQSSEDIQEELTNLNSELTQEEIEQISNLKGYTGTHNLSLKAINLILDELWHTNDNQIAIFNRLKLVPKKVDLSQQKEIPTTLVDDFILSPVVKRSFIQSIKVINAIIKKYGLPNDIIIELAREKNSKDAQKMINEMQKRNRQTNERIEEIIRTTGKENAKYLIEKIKLHDMQEGKCLYSLEAIPLEDLLNNPFNYEVDHIIPRSVSFDNSFNNKVLVKQEENSKKGNRTPFQYLSSSDSKISYETFKKHILNLAKGKGRISKTKKEYLLEERDINRFSVQKDFINRNLVDTRYATRGLMNLLRSYFRVNNLDVKVKSINGGFTSFLRRKWKFKKERNKGYKHHAEDALIIANADFIFKEWKKLDKAKKVMENQMFEEKQAESMPEIETEQEYKEIFITPHQIKHIKDFKDYKYSHRVDKKPNRELINDTLYSTRKDDKGNTLIVNNLNGLYDKDNDKLKKLINKSPEKLLMYHHDPQTYQKLKLIMEQYGDEKNPLYKYYEETGNYLTKYSKKDNGPVIKKIKYYGNKLNAHLDITDDYPNSRNKVVKLSLKPYRFDVYLDNGVYKFVTVKNLDVIKKENYYEVNSKCYEEAKKLKKISNQAEFIASFYNNDLIKINGELYRVIGVNNDLLNRIEVNMIDITYREYLENMNDKRPPRIIKTIASKTQSIKKYSTDILGNLYEVKSKKHPQIIKKGEGADKRTADGSEFESPKKKRKV

SEQ ID NO: 399 - DNA, 30 bp, Artificial Sequence
  Description of artificial sequence: synthetic oligonucleotide sequence
attctctttggacagtgtccatactggtgg

SEQ ID NO: 400 - DNA, 30 bp, Artificial Sequence
  Description of artificial sequence: synthetic oligonucleotide sequence
taagagaaacctgtcacaggtatgaccacc

SEQ ID NO: 401 - protein, 10 aa, Artificial Sequence
  Description of artificial sequence: synthetic peptide sequence
ILFGQCPYWW

SEQ ID NO: 402 - DNA, 30 bp, Artificial Sequence
  Description of artificial sequence: synthetic oligonucleotide sequence
ccaccagtatggacactgtccaaagagaat

SEQ ID NO: 403 - protein, 10 aa, Artificial Sequence
  Description of artificial sequence: synthetic peptide sequence
WWYPCQGFLI

SEQ ID NO: 404 - RNA, 108 nt, Artificial Sequence
  Description of artificial sequence: synthetic polynucleotide sequence
caguauggacacuguccaaaguuuuaguacucuguaaugaaaauuacagaaucuacuaaaacaaggcaaaaugccguguuuaucucgucaacuuguuggcgagauuuu

SEQ ID NO: 405 - RNA, 111 nt, Artificial Sequence
  Description of artificial sequence: synthetic polynucleotide sequence
uuucaguauggacacuguccaaaguuuuaguacucuguaaugaaaauuacagaaucuacuaaaacaaggcaaaaugccguguuuaucucgucaacuuguuggcgagauuuu

SEQ ID NO: 406 - RNA, 100 nt, Artificial Sequence
  Description of artificial sequence: synthetic oligonucleotide sequence
caguauggacacuguccaaaguuuuaguacucuggaaacagaaucuacuaaaacaaggcaaaaugccguguuuaucucgucaacuuguuggcgagauuuu

SEQ ID NO: 407 - RNA, 109 nt, Artificial Sequence
  Description of artificial sequence: synthetic polynucleotide sequence
ccaguauggacacuguccaaaguuuuaguacucuguaaugaaaauuacagaaucuacuaaaacaaggcaaaaugccguguuuaucucgucaacuuguuggcgagauuuu

SEQ ID NO: 408 - RNA, 110 nt, Artificial Sequence
  Description of artificial sequence: synthetic polynucleotide sequence
accaguauggacacuguccaaaguuuuaguacucuguaaugaaaauuacagaaucuacuaaaacaaggcaaaaugccguguuuaucucgucaacuuguuggcgagauuuu

SEQ ID NO: 409 - RNA, 111 nt, Artificial Sequence
  Description of artificial sequence: synthetic polynucleotide sequence
caccaguauggacacuguccaaaguuuuaguacucuguaaugaaaauuacagaaucuacuaaaacaaggcaaaaugccguguuuaucucgucaacuuguuggcgagauuuu

SEQ ID NO: 410 - RNA, 112 nt, Artificial Sequence
  Description of artificial sequence: synthetic polynucleotide sequence
ccaccaguauggacacuguccaaaguuuuaguacucuguaaugaaaauuacagaaucuacuaaaacaaggcaaaaugccguguuuaucucgucaacuuguuggcgagauuuu

SEQ ID NO: 411 - RNA, 104 nt, Artificial Sequence
  Description of artificial sequence: synthetic polynucleotide sequence
caguauggacacuguccaaaguuuuaguacucuguagaaauacagaaucuacuaaaacaaggcaaaaugccguguuuaucucgucaacuuguuggcgagauuuu

SEQ ID NO: 412 - RNA, 104 nt, Artificial Sequence
  Description of artificial sequence: synthetic polynucleotide sequence
caguauggacacuguccaaaguuuuaguacucugcggaaacgcagaaucuacuaaaacaaggcaaaaugccguguuuaucucgucaacuuguuggcgagauuuu

SEQ ID NO: 413 - RNA, 96 nt, Artificial Sequence
  Description of artificial sequence: synthetic oligonucleotide sequence
caguauggacacuguccaaaguuuuaguacucgaaagaaucuacuaaaacaaggcaaaaugccguguuuaucucgucaacuuguuggcgagauuuu

SEQ ID NO: 414 - RNA, 96 nt, Artificial Sequence
  Description of artificial sequence: synthetic oligonucleotide sequence
caguauggacacuguccaaaguuuuaguacccgaaagcaucuacuaaaacaaggcaaaaugccguguuuaucucgucaacuuguuggcgagauuuu

SEQ ID NO: 415 - RNA, 108 nt, Artificial Sequence; identical to SEQ ID NO: 404
  Description of artificial sequence: synthetic polynucleotide sequence

SEQ ID NO: 416 - DNA, 24 bp, Artificial Sequence
  Description of artificial sequence: synthetic oligonucleotide sequence
ccaccagtatggacactgtccaaa

SEQ ID NO: 417 - DNA, 24 bp, Artificial Sequence
  Description of artificial sequence: synthetic oligonucleotide sequence
caccagtatggacactgtccaaag

SEQ ID NO: 418 - DNA, 24 bp, Artificial Sequence
  Description of artificial sequence: synthetic oligonucleotide sequence
accagtatggacactgtccaaaga

SEQ ID NO: 419 - DNA, 24 bp, Artificial Sequence
  Description of artificial sequence: synthetic oligonucleotide sequence
ccagtatggacactgtccaaagag

SEQ ID NO: 420 - DNA, 24 bp, Artificial Sequence
  Description of artificial sequence: synthetic oligonucleotide sequence
cagtatggacactgtccaaagaga

SEQ ID NO: 421 - DNA, 23 bp, Artificial Sequence
  Description of artificial sequence: synthetic oligonucleotide sequence
agtatggacactgtccaaagaga

SEQ ID NO: 422 - DNA, 24 bp, Artificial Sequence
  Description of artificial sequence: synthetic oligonucleotide sequence
gtatggacactgtccaaagagaat

SEQ ID NO: 423 - DNA, 24 bp, Artificial Sequence
  Description of artificial sequence: synthetic oligonucleotide sequence
tatggacactgtccaaagagaatc

SEQ ID NO: 424 - DNA, 32 bp, Artificial Sequence
  Description of artificial sequence: synthetic oligonucleotide sequence
acctactgatgatgcacctttgatcaatagat

SEQ ID NO: 425 - DNA, 23 bp, Artificial Sequence
  Description of artificial sequence: synthetic oligonucleotide sequence
catcacccctcgggatggttctt

SEQ ID NO: 426 - DNA, 25 bp, Artificial Sequence
  Description of artificial sequence: synthetic oligonucleotide sequence
cagcccagaatcccaaccacaaaat

SEQ ID NO: 427 - DNA, 22 bp, Artificial Sequence
  Description of artificial sequence: synthetic oligonucleotide sequence
agaccagctcgacttgggatgg
